United States Patent Application Publication US 2022/0211063 A1 - sequence listing, part 32

SEQ ID NO: 103 - DNA, 8605626 bp, Penicillium roqueforti (residues 5,163,379-6,884,504 of 8,605,626)
  misc_feature (89143)..(89590): n is a, c, g, or t
  misc_feature (91422)..(91652): n is a, c, g, or t
  misc_feature (329881)..(330017): n is a, c, g, or t
  misc_feature (430768)..(431099): n is a, c, g, or t
  misc_feature (461651)..(461667): n is a, c, g, or t
  misc_feature (496410)..(496589): n is a, c, g, or t
  misc_feature (532013)..(532107): n is a, c, g, or t
  misc_feature (539763)..(539898): n is a, c, g, or t
  misc_feature (569547)..(569751): n is a, c, g, or t
  misc_feature (649064)..(649200): n is a, c, g, or t
  misc_feature (691125)..(691187): n is a, c, g, or t
  misc_feature (866510)..(866674): n is a, c, g, or t
  misc_feature (1032466)..(1091865): n is a, c, g, or t
  misc_feature (1092552)..(1092763): n is a, c, g, or t
  misc_feature (1210196)..(1210408): n is a, c, g, or t
  misc_feature (1240554)..(1246826): n is a, c, g, or t
  misc_feature (1247753)..(1253685): n is a, c, g, or t
  misc_feature (1258304)..(1372303): n is a, c, g, or t
  misc_feature (1374137)..(1374545): n is a, c, g, or t
  misc_feature (1457544)..(1457830): n is a, c, g, or t
  misc_feature (1505357)..(1505529): n is a, c, g, or t
  misc_feature (1513228)..(1513390): n is a, c, g, or t
  misc_feature (1624050)..(1624251): n is a, c, g, or t
  misc_feature (1669160)..(1669365): n is a, c, g, or t
  misc_feature (1761228)..(1761454): n is a, c, g, or t
  misc_feature (1817775)..(1926074): n is a, c, g, or t
  misc_feature (1933175)..(1933425): n is a, c, g, or t
  misc_feature (1963987)..(1964364): n is a, c, g, or t
  misc_feature (2150522)..(2150620): n is a, c, g, or t
  misc_feature (2196752)..(2196960): n is a, c, g, or t
  misc_feature (2250746)..(2250802): n is a, c, g, or t
  misc_feature (2391558)..(2391849): n is a, c, g, or t
  misc_feature (2493588)..(2493819): n is a, c, g, or t
  misc_feature (2532194)..(2532471): n is a, c, g, or t
  misc_feature (2536340)..(2536581): n is a, c, g, or t
  misc_feature (2786627)..(2786883): n is a, c, g, or t
  misc_feature (2859585)..(2859876): n is a, c, g, or t
  misc_feature (2873996)..(2875100): n is a, c, g, or t
  misc_feature (2881617)..(2881922): n is a, c, g, or t
  misc_feature (2897171)..(2897349): n is a, c, g, or t
  misc_feature (3050746)..(3051470): n is a, c, g, or t
  misc_feature (3057261)..(3057512): n is a, c, g, or t
  misc_feature (3069611)..(3069986): n is a, c, g, or t
  misc_feature (3075842)..(3076216): n is a, c, g, or t
  misc_feature (3304906)..(3305003): n is a, c, g, or t
  misc_feature (3318192)..(3318516): n is a, c, g, or t
  misc_feature (3502503)..(3502617): n is a, c, g, or t
  misc_feature (3537788)..(3538371): n is a, c, g, or t
  misc_feature (3783217)..(3783431): n is a, c, g, or t
  misc_feature (3992070)..(3992188): n is a, c, g, or t
  misc_feature (4004970)..(4005233): n is a, c, g, or t
  misc_feature (4027160)..(4027360): n is a, c, g, or t
  misc_feature (4058285)..(4058431): n is a, c, g, or t
  misc_feature (4267035)..(4267072): n is a, c, g, or t
  misc_feature (4352538)..(4353000): n is a, c, g, or t
  misc_feature (4361537)..(4361689): n is a, c, g, or t
  misc_feature (4393455)..(4393688): n is a, c, g, or t
  misc_feature (4451187)..(4451324): n is a, c, g, or t
  misc_feature (4461216)..(4461462): n is a, c, g, or t
  misc_feature (4480922)..(4481040): n is a, c, g, or t
  misc_feature (4533587)..(4533724): n is a, c, g, or t
  misc_feature (4589847)..(4590075): n is a, c, g, or t
  misc_feature (4668669)..(4669001): n is a, c, g, or t
  misc_feature (4736843)..(4736937): n is a, c, g, or t
  misc_feature (4766465)..(4766662): n is a, c, g, or t
  misc_feature (4834245)..(4834552): n is a, c, g, or t
  misc_feature (4927235)..(4927808): n is a, c, g, or t
  misc_feature (4944816)..(4944966): n is a, c, g, or t
  misc_feature (5082236)..(5082384): n is a, c, g, or t
  misc_feature (5112277)..(5112998): n is a, c, g, or t
  misc_feature (5314355)..(5314548): n is a, c, g, or t
  misc_feature (5372288)..(5372715): n is a, c, g, or t
  misc_feature (5458669)..(5458780): n is a, c, g, or t
  misc_feature (5479980)..(5480153): n is a, c, g, or t
  misc_feature (5535122)..(5535136): n is a, c, g, or t
  misc_feature (5567270)..(5567409): n is a, c, g, or t
  misc_feature (5598490)..(5598703): n is a, c, g, or t
  misc_feature (5726526)..(5726604): n is a, c, g, or t
  misc_feature (5743037)..(5743505): n is a, c, g, or t
  misc_feature (5807199)..(5807285): n is a, c, g, or t
  misc_feature (5919535)..(5920213): n is a, c, g, or t
  misc_feature (5921527)..(5921833): n is a, c, g, or t
  misc_feature (5942409)..(5942688): n is a, c, g, or t
  misc_feature (6010874)..(6011169): n is a, c, g, or t
  misc_feature (6324695)..(6325013): n is a, c, g, or t
  misc_feature (6397105)..(6397216): n is a, c, g, or t
  misc_feature (6604362)..(6604532): n is a, c, g, or t
  misc_feature (6843301)..(6849052): n is a, c, g, or t
  misc_feature (6859407)..(6860047): n is a, c, g, or t
  misc_feature (6914764)..(6915551): n is a, c, g, or t
  misc_feature (6918855)..(6923725): n is a, c, g, or t
  misc_feature (6950174)..(6950310): n is a, c, g, or t
  misc_feature (7009778)..(7010015): n is a, c, g, or t
  misc_feature (7088368)..(7088591): n is a, c, g, or t
  misc_feature (7280661)..(7280840): n is a, c, g, or t
  misc_feature (7435020)..(7435145): n is a, c, g, or t
  misc_feature (7579716)..(7580036): n is a, c, g, or t
  misc_feature (7597713)..(7597862): n is a, c, g, or t
  misc_feature (7638927)..(7639043): n is a, c, g, or t
  misc_feature (7648137)..(7648344): n is a, c, g, or t
  misc_feature (8007031)..(8007217): n is a, c, g, or t
  misc_feature (8052759)..(8053224): n is a, c, g, or t
  misc_feature (8128886)..(8129301): n is a, c, g, or t
  misc_feature (8133596)..(8133784): n is a, c, g, or t
  misc_feature (8187871)..(8188020): n is a, c, g, or t
  misc_feature (8239554)..(8240025): n is a, c, g, or t
  misc_feature (8245462)..(8245573): n is a, c, g, or t
  misc_feature (8304738)..(8305328): n is a, c, g, or t
  misc_feature (8313694)..(8317811): n is a, c, g, or t
  misc_feature (8345163)..(8345264): n is a, c, g, or t
  misc_feature (8407543)..(8407749): n is a, c, g, or t
  misc_feature (8424434)..(8424559): n is a, c, g, or t
  misc_feature (8481328)..(8481551): n is a, c, g, or t
  misc_feature (8596939)..(8597185): n is a, c, g, or t
atatcgaaaacaaccccgtagctttggcttctcgcctcgtcggctgatagcttctttgccgcgtcgacaaatccttgtgtcccattgttcacaaccgcatatggagaccgggtcatttcctcagcagaagtaataccagatatcagagacccactagcggcaagaccggagggaacgaggacaaagattgccggcagcattgccgcagcggcgagcccatgctgtaagcggctgtagaaattgcccatcacaccaatgacaaaggcgcccagggcattggatacctgggtgttggaatagaagcgcttggcgctgaagtagttggtcacgtagccagccagggagatcactatcataatcggcatttgcttccacttggcgcggttgacgatcgccaggcacacagtgaataggatgacgaacggaaaccgttgcaggtactcgttgtggatggggctggcgggacatgtatacgccgttgaagcttgagagtcgaggagcccgtaaacggcagtgccgatggtaattccaaatccgaggaacagcgagtatatgatagcatagaccatgcgaacagaacctgcaacgatactgcgtgactggagctccagactagcacataatacagtgtatcctggcaggatgagggcgatggccgactgtgcgagggcagaaaagcagaacagaggttccccattgaacctgatgcttccaaaggcacgggcaaggaaagacgtcaggactgcggcggagatctcaaacacgttcgaatataggctcgatttggttgacaggatcaattgtaacacgccgaggagacatcccagtagaaacgccacggggatatccaccggtcgggcgttgaaggcaaagggcccgactgatgcgctagcacagccgtgggcgaagatgaggaacataatgtggaatttgctctgcttcttcatgacctcatcgagccgctgtattgcctcttcaaccccaataacatcgtgaatcacttccttataaatctcatgcacatcagccagcttacccaggtcaatgccttgactggatcggacgactttgacctctgttgtgtgtgtggaggcgtcgtcaaaggagatgatcatgcagccgggtatgtacaaaaactggccatctatttggatgacgcgagctgtcatgcgcatatattcctccaatcgatgagttggagctccatacttcatcaaagcgcgacaaagctggatcaagtaccgttgtcgagacagaagctcggcaatatgaacagtgatatgaatttcatcctcaagctgagccttgggacgtgagcggcttaggtttggaacggccgcaccactgctgcgggaccgcgtgagcatggcaaagggggagccagagcggcgggaggagccggccatggaaatgctagaacgagcggttgatttatcgtaccacttcctttgcggtttccaaacggagtctggagacaggccacgtccactgaactcggaagagctcccctgtcgagaccgcccataccgtcctcgaccttggttgtggttataacgaggcttctcgtagagcttgagcagcgatgagagaattcctccgtgataacttgtcgtccgttcagcagactcgtatgagttcctgtcctcgctgacggtgtcttggtcactggagtgcaacccgggagactgagggcgaaggcgagtcagaaagttcaggtctcgaggtgacatttgatgcactagataatgtgctccggagttgcacggtgttgatcgcccgtctaagaattccgcttcatgttcatctattaggttgtcgaagagttgttgtttctcggggaagcttatcacaggaaatttatcttcatctgcagtctggcacaccacttcggtgggggtggatccaatctcagacactagactgcactgggggctttgcttcggacaattatgcgggcaattgagaagggatgtgagcctgtgggccctttcatgtgcaaagcagatggcccgccccttgtcgttcgtaccctgaccaagctcatactctgctgaagttcctggtgagctagtcctggtgctgatcgtcaaaccggtaacacccgctgacgcgctaaaatgatcgtcttccacctgtggtgccagtggggagcttgaggatactttctcctgaaagcccggaatgttggcagtgggtaatggtctttgcggcagctcggtgcccctttgatccagtcggaattcgaccataggcccagtgggttgttctctcaaatcggattcgctgtccgtaagcttgacgcgatttgtgtttttcagaatgccggcattccgatacttgtcctgtgcgctagcgtcactgaagctccgcacctgagacactggctggccttggaagctatcaatgagcagtgatgatgtaaaggaacgcgaccttgatagactggacgatccttcctcagaggcgctgcgggagatcggaaggtcaaaataacctcccgccattatggtgtaatccttcctcttagattggcatctacttcttggttactcagtagagctcacagaccccctgggttaccgacctcttagataaaagcacgggtatggcggttcatgtgcccaggtgatcaactgtaacccagcaacagtcagctatgtgatataacatggggagagctcttctttccgggaatttgtgagcttcgacaaccacggagagtgagctcacctcattcaaggcaaaagcataaaaaaaaagaggaagagatactgatgccaacgcgaaaaagaactggcacgaactaccacgccgggtctagagctccttgggaaggggggttgagatcggagatcctaccaggaattccaactatgtcatgtgtacataattagacgtagaatattgtgtcggaaaataaggacatctgcaacctcggaggaaggggcaggaggaaagaaatcaggcaaggcaaaatcaatataaaagagacagtagacgcgaagtttgggatgcaggagttcctctatttacgaggatgctctcggttaaaggcaagactaaaacaaaaagagaaaaaagacttttccagcttgctgggcagcacacgggccatatcaagaagatccagaggcccaatgagactgcattgaaggggatttattttgggacatgatgaccccgtgtagccgtgaggcgccatccccatgccaggttctcacaggttttgccattttgccacgatggtcaatcagctggaaagttccaggagtagagaacaagccgaggtatggaactgacagctagaattgtgaatagaaacggtacattgccccttagcgggtattgcgggagattggcacattagttgcgcgagacccggttctctgacctgaaaaggattggatttgcagcacagccgacgttccggatcgtatatcgttgaacctcgccgaacctcgaccgttagacctagcagaagatctcccaaaggggatagagataaggggaccgagctccttgtcaaagagactaggggtttcacaagtccatgaggtcccacaaaatctgtagagtcaaaagagaatctgatggacgcgtcaggtcaaaggggtgtgtgtgtgggtatcgagagattggctgaagagggatcttcaggatcagaggttgaagaagatcagtggagcaactctcttttttttagcgttgatctaccttttcatgttgactaagaagcaatatctggtcttatctccccttctatttctacttgcgtccacattgacgtatgaaatgcgattacgaaccagtccaaaccatcccttgtgtgtctttgacatcatgggaaatcatccgacaggcgaaacatctctgtcatgcaagatacctgcaagatacctgctttcactagtttctgattgattcgaccagtcgagaactacatacgtaggattccaacactattttattatccacctacatactataattccacatcaatatgggtctgaagatccctatcacaccatcgggaagaatctcatcggtattgatggccatctctctactttccgaccgagatcttaccgagaagcaaatgagtactcataccgcaggttgacacccggaagacctccgggacccgactcggtgttgattctcagaggggatgttgaaggtttttgatctgtcccggcaatgtacagggtaccacgatgaaaggttgcactaatatccggggaaactgtttactctctctgcttgttccagtgctgtaaccaattctactgcccataggaaagcccgacaagcacacatgcactcctcagcgggctcgaaacgcccccttcatgttcaaccaatatcccacagatgagctcctcgctcgtcattgtgccacttcaagatgtgagatgcttatctaggcaatgatcattacccaacctatgctgcctaaaaccctacttcaagggagctggggtgatttaagcttacaggtgtggctgctgactagttctggatattgtactagtcatggttatcagtcagggggggacagccagggcccaaattatttctcgagtggcaacgaacggtacattcaattgggtactgtgcaaggtgactcttgaatctctgagatggtatcagatagggccaggattgtctctttcgaggcgctcgttatcaaacgttagtattgaacattctgatggagttttcgtgcgctattacattgggccattcgtggcttggggaggggctttctcccatttgtttctcttcttggactagatcaatatcttacgctatcacaactgtagaggcttgattgaatatgtcttgcttcacctctatctcattattttatgcaacaatgcgaccgcacaaccatccgtgtcaccctcaccctccctgtccgtcacactgtcttcttccccaccagctgtaccgaagaatataatggtgtgaccttcaagaaagtagggaccaatactcaagcttggacggcagtactatactgtttatgtgaaacacatgtgccacggagttccggctgctctaccctcgggtagacacagataaagctgctttaatcccaggattcttacgtggcctgggagtaagtaaatatatcgtcttctacaattatgcattgtggcattacactttagagaacgaagatcccgttcacattcctaaagttaagctctcgactactatatataggttttgtcaatggtaaatgtcttgcattgcgtatgtttcaacttcctttctttcatgatggttccaggattgttgccattgtttagttgacttgtagacacgtagaaataatgtcaacttagagtttgtgtcaaggttttttgggccgtattcgtaccatggttcttgatataacgaccgcataactatttaggtgaatgcatagtgattcgtatgttccaatctcaactcttagaatatcaaggtttggacgccggcatgacaaccagccaagtatatcaaactaggtgccatctgcacccacgcggaatacggtttattgggcttcactctgcagcccaacggattatttccctattcaccgtgcagacggaaattaagctacgtatatgatgagaagccaagagccactaaacacttaataacatttatcacatcgtttactgtcactgaagtcctcatttgggccaactcatcactttcctcactgacagcggccgttcgagatctgagttcatctcagtggatgtataacaatcagttctcatttcgccttttgacaaaagcgtaagctggaaccgaaatagttatgcagctaccccaagctcgggaccaccctccataagcatcagcatacaacccggctctgtaaccatgacactcagcgtgaggtacattacatggtgcatcaagacgacagacctttcaatgtggtctagtgagattgatactgccccaagccatggtgacctctagtagccattctttagagtatcttgtaaccctttgaccctaccctggcttatgcctttcttactttcaaacatcaagcttaatgatagaaaacgtctttcctacagcaatacctacccaggactcttcaacagaccgagtaaccaagtgctccacgtgggtcattgcaggacaacaccaggattatcataggatctaagaaaaatatttgcgtattccgaataagccgttgaattgttcaaccaaaaaaactacttagatactagatacgttcatggagcatgatcaacatagccaaaacaaaaaataagatcagatatttgctaagatatgtattcaccagggtgatctgagctcaaagtgcactgggaagagctgtctgtacataaccagatgtacatcagaagccaaattgagaagtgaagggaagacaacttgccatcgcaagttcctcttcctgtctcaagctcatcctgtcatttccaagtaaatagatccggtccgcccagcctcagttatgatgcaaggtgacaaagataaagcatagtggagaaatatgaagagaagccaaaagaaaaaaaataggaataaagtcatctcagaccgataaaggtctttcgtcacaaaaaaacatgaaccctggcatgagttgccagcaatagagtggtaacgagaaaaagaatgggggagggtcagccgctgtcgagtccttttaatcaggactcgctgggcaaagaaagacgaaagctgacccgtttggcgagagaaaaacataaaggaaggtcatacgtcgctgtcacgtgtggttcggcattacatgatgggtgtcttgcgtttttcagcgctggacaacaccagcatcggcgtcttgcgccgttctggtgcctgggctaccggcccctggccagcaacgacatctgccactgagggcgacgaggtaccactggcactaggtgagtgggcataatccccgcgagcatcaacaagctttgagtaaaagtagcctccgtcttcgctagtcggcgtggcgctgtggaaggggctgtccggggatttgcgatcccgaccagatttttcccttctctcggatccaatggcaccattagcaactgctcgcaggctgcctagactgggcttgctggagagacttcctccgctacgcacggtggcatcatcgccatccgaaaaagtaaactctttctcactcgcaggggtgttcgtgcctccgctgctgtggtatccaaaactgcgtgtgtcgccacgacgctcgattcctgcgcgaacaagattgtgaacggcacgacgccgctggcgagtcgcgaagttcttgctaccttcgtgcttggaggtgggcttggccacgagatcctcaagcgaaggggggccacggggctgacgcatcggatgctcaccagcacgactttgaccgggtccaaatgttccagtggccggtgtcggcggcagggcagcagacctagggccgggtcccacattggccttgacagtatcaatgttcgtcttgatacttgggttgaacgaaaggttcttgcggtggcctcggcgcagagcattcacagacgagtcgtggggcggagaggggctgctaactggaggggaaattggctgcgggaattgcatggtagagtacgtggagtccgcaggaggagaaatttctgcgcggaactggggaacttgctggccaatatgggaccgagtatcttgataaaactgttgctggcgatcttcctgggagttatccatgatatagctttgttggccagtcagaggattgtagacgcagaacattccaggttgaccagggaccggctgcacaatgggctgaacaccttgctggagctgctgttgataaaatcccatgccagggatggagagtgaaggagcatgttgctgccgaggaagggacatcccaaggttgaggccttggaattgctgagctgcagcagtgacactgatcaactgctgttgcaggcgttgctgctgcgccgcaaggaacaggttggttgacatcaactctgcgtacatgttctcatcgattggaatatcaccacccgccatttcaagcgtcggaggtgcaagaacctgctccggcatagtgtacatcatgcggttgtgatgcgagttgttgcggtacgagttcgcgttttgattttgggtgtaattgtgctgtgggaatccagttccggtcgcagtttgtgggacccggtcggatcctcggttggaataaccagtgaatcgtgcaccttccattccactccgctgttgatgctcagaggggatcgtcgcagacttgggagcagtgcgcagtccagccaaaagatgagagcggctggtacgcggagtggagacggatgctgatgcctgggactcatcgatggtcgaaacctggggaggcatgctcaagcgcttgatgtgagagcccttgccgcgcgaggcgaagccagagcccggcacgcccagggaattgccattattgaaggacgaattgtaagacatttgagcaagaccgccagcgtccatactcatattcgttcggtagaggtgaatttaggtatgtgcaatagaatgcaagcgagacaagcggtatcttttgacgttcggattcgacgtgagcgtttggggtcaaccacaaagctgagctcacttctcggcgattaaggaattatggtgtctatgcgagaacaagtgctgaaataagtctgcaatatcgagattcaacgaccggaaaatgaaacgtggacgcgagagtcgggttttctgtatccggaaactggtcagtgagatccaacggatggggcacaaggcaatcacacgtaccaatcacaggtgaagaaaataaagcgagcgagtggctagcgataaagacgatagatgagagaagaaccgagctgtacaaggacttgctgggtttgaaagttgcgaacccaaggaataggtctcgaggaagccgaggagtttgagatatgttgacagacacctcgaaagaaaaaagaagaaaaaattaagagggtatttttaggaagagaagccacgcacgaagctagaccacgaagaaaagataaaatgtccgggggaaatgctctgcaaatcctagccgaataagaaaagagagtagttcacgcgatgccgaagatcgaagacttgtaggctgaaacactcaaggtggcgaccaaacaacccagtgctgtgcgaataaccgaggtgaaaacaggttcaaggatccgaagagatggatttgtgaagacaatcaaaaatgtagtgaattcggtccttggccaaacacaacgtttttcctcaggggggcggaactgatcgggactatttgcaaagtggatagatgctttttttgggtgttttccatgaaatgagaagagctgcagagaaagaaggaatgcagaggggaagggaaaggaaaagaaagaatcgaagattagatggagggttggatgtaagagaagaagaagaagtgagcgattaaagatggtggatggccgcggggattgtcgcctaatccctcaggcagcaaccgagcacaatagtccaaaagcgtactagcgtcttttctcaggcacgagaggcaatatcaacggaatatcaacggaggttcactttgatatcttcttttcatcatgtttggaaacattggggtaattcaagctttttcagctttacccttactctaggcaatatcctattctctaccgaatgcctgatcatagctgacagcattatcatagaagacccattgaggagatctgactggctcattctattgaccaataagcaacacacccaggcctgaagcgatcccatcacatccccagccaaatcattggctgttatccactagcggcgcgacgtggctgccatccaatctacgcctgacgatgcccctggagccgctcgtcgcaaatgccaagctgtcggcgccaaccaatgggtttacctgaacttgtttgcttctagctcataattcagtcggatctcgttatggtcaggaaatcaggagtgtagtattttgccacgaactgcaagtgatcttaggcggctttgatttctagaaggcaacaaaaaccaggaaaaaccaagaaaggtatcgggcttgcagaacattgtctgctatttcgatacagggtagaatctaagtagactacaattctcatcacattcatggttggatgctttctcatgatacattgcacataatcaccaaatgatgcgatgtatattattgtagaaaagatcacattctcctgaatcatgaaaccagcaggacttgtcgcttgttgctaccccaacgacaagccgacgtcttcttcagcaggaagttccggaaattaaaaattggcttcatggctgcccagacgggcgtgcaagtccagcaacaaataatatggacgtgcaccatttattttggggccatatatagaacaaggtaataagagactgcatagactagggaactgttaagtgagatcgtgacataggagttagcgtgattatcatctacaacggccatgaagatacggattgtcaattggataattcatgtaaacgcaggtgtaaaccacgcattttgtcgccctaaatgaaccatacatggataagatacgtctcagcccctcctggcttcgtatttcgcatctcgcccgttccggagccgctgtctcccacgttgtatgtacaatgtacaagcactttgatggtctgtacagacacacgaaaagagttagactgcctgtgcgtgcattgtcagaatgccagtcaaatggcgaatggacccagaaccacaactagatgagttgttaatgagccatgagaacatgaagaaaagataaaccaatggatacgaagaagaaagagaagatgcggggtatctgctggctgggtagtgtgccagagggagaaaatcaatgagtcatgaaatataatcaaacataaaagttcacgcgtgcaacctcgcggtagttaagcatccaccgagacaccgggtccatggtgagtggccgactcattctgggatggtaatcgtcgatgacctagctccggagtagtgcccttgccgttcattcggtcaaattccaacgtctcggccaactccgcagccatagggtctagatcttcttctttaagtccggtcgccaaagccaccagcttacggtgcatatcgaacttggtgctcacacccgcatccgctgtttgttgggctagatccttaatagcattgcggcgtatcttctgcgcagagcaaagctcttgagcgagtcgataccgagccattaattcaccttgctcaagggactctgacgtaggtttaggtacctccgcaatagcaaactgttcagccaaccgagcatgctggatttgctcaagaagggactcatagcttgcccgcaatttttcatatcggccagcttggtcgtcattgcgctcatgatcggcctccttggctgccaatgcagatatttgcttctgaatcttctggcggtcggattccaattgctcgtgtaacgcttcgggattggcgacatcattggaatcctgctggttgattttcgagtttccataggtcacggcaagctttttattagcctcggccatgattgttccaatcctggagaggagttcagtggtcgcaggggcatccggaattggggcaacggactgtcggtctgtgcccacaagaccagctggttcaacatccatatgttcattagccatggtgacggaggatggggccggcgggatgtcatggtcgtgatgttgagaacgctgtacgatactgctagcggtttcccccttattattcaccagatcgccagcgcgatgacaatgcacaagaaggatattcaccagacggaacgcgccgttgcgagcagcgaccaagacagcggtgtctccattctgatcttgacatgacaacaacatttgtacttcatcttgcgagcatgttttgcataacttatcgaggagtatttcgcagtaataacgtgagctcttccatttccccttgcttcgagtattctctgcaatgtgatggaagatagtggcaccgaaccaatctcggaaagagacagtatccagaagcatgtctaagagattcgaaaacgttctcttttcgtaattattggtaaacagaacagctcggacgagtggggtctcttcatgatccgaaagtgccttgacattggcccctctgtgcaaaagatcttgcacaatgcccaagtcacccatcgcacatgcccagtggagtgctgtgttcccagaatcatcaatagctcgatcgacctggaaatgggcagggggttcgggagggggaatgcgtgttgcctctggtgcatcacccacggtcatgaaatagtctaaaagttggtcgccgtagattatgtgttcttgctcgctgatggacataggggtcgcctcctccactccacgcttccgcttccgtccgccatgtgacatttgaagcatatcctcgtctgcgaccattgatgatgattcaattgtagcgtgcccgattgactcgttgtcgtcaaacgctgcattcatttcatagtgatcctgtggaattgttgggggacccatgctgcgctgaggctgaacaactttcaggctttcggaagctgctaccgcagccgcggccgcggccgcagcggcagcacggtttgcggcggccgatttccttggtgccctaggtttggatggagccgatgtgtgctttggcgctggtgggggactgtggtctccagcaacataatcgaaaatcggagctagttttgtgaggatgttgttgcgttccgcaagctggcggccttccggaagtgggatccatgttcctgtgagcattagctgtcagcaagctaaattttctacgggcttcatagatcctaggacataccttgatatttgccatagcctccctgaactttctcatgtacccccttctggacctctcgttcaagaatgcgcgttcgtgcaggcttatcaaaccctgcggctttgaggatgtgtgttgcattgacccaatcatcccctctccttctcatcacactttcagtgtcgagcttgaactcatacacggggacctgggagagagaacgtcagctgtgcgcgcattcaacacggacaacaattccaggccagcgcagtgaaaatatctaatcaaggtatacttacactgctataggtagcagagtagatggtgtctctccccgccataatgtgcgtcgcgcgttggccgctacaattcagtaggttcccgaagagcgatgtaaccgcgcgcgttggagccaaagcgtgacccctagaagacccacaagttgatcggcttaagaattcttcagaactagatgcattgcatgcaatgaaaatccggaccaagaacacagagatacgattcggtggagctggggacatcagatacgcgctggacgcgtaaagtgcgcactagtcctgtttcggaagactatctgtcatgtgattttgtgtcatgtgaccaatatcggcccagcaggaacctcagacgaacgggaatcgccaaccacgccgttttgcctctgtttccccgctccttgcctctccaccccttaattctcgacaaaatgactgtcattgaaacggttaagagcgccgttggcctttcggagacatccggtatgattcttaggccattgattaacaatcataagctctagcaggaaggttaaccaaattccagcaacccgccaggaaatgtcggaagcccgtcttcccatgcagtacagagattcatgcgcacacctgctgatcccgttgaaccgatgccggcaagcagagtactaccttccctggaagtgcgaggtacgagatccctcgttttgatgttcctacacaacgccattcgaccggagcgcttccagagctagtcagctaatgttttcttttcttttgtatcaggatgaacgacactcatatgagaaatgccagtacgaagagttcaagaagcgcgtggccaagatggacgagctgcgtgccgccaaggactacacccggcgcaactgaattgtgggactgttggtatgcgcagtcggtgctgctgttaaagcagcaggatatgtaaataatagatacaccgaaactgcttatggattgccttttggcgttgggacctttcatcaaaatcggccactttttcttcgcccatctgaacaacaatcgcatcggcaacttgatgctctgtttagtattggctaggctggtacccatgcttctcgggctggcctttttcttgggccaagcaatgtctatggacaactcgtcctttggcatagctcgagcgcatgtaagcagatggcatggtgggttataactctagtggactctaggggctttgaataatcaattcattggagttcctctgtgatcaagacgctaggatttatagttcttttggtgaacttaggccgcactgctttgctctaggcaattatgccttccaatgctgttacgacctaccgatgtgaagcctgtaagctcatttgagatatttacctatgtattttatagatctcgccctatattaaacatcttgagctatcttgagctatgatcatcgcatgttgtctaattaaccccatttagtcctgcgtccaatgaccgtttgcggctttataagcttaagccgcaagttctattggctgtattgcggccgattggttgcacgatattatactaattgtaggaggtatggatggtgataattgaaacagctggacaaattgaataagaccgaaaaatacagtctttcctatatagctcttgatgaagagctacccagatgatttctctcatatggatgtctcatataacatcgcattataacgcgatacctgcttatttgacacttgctttcatgcagattcacgcagtagtcattgaatcatatcaatcaatcccttatacttgtgccatgttctatgtgatatttggcatagacttctacctatcctataggtaatagcatccccacagtttagctgaatgtgggtatcgaacatcattcaagtttatcttggtattaactactgactatcatatctggatccattttcattccctttgtatatatacaacgctcaggcctataatagacgcctttatggtgatcctcgaagacgcaagtgcagggtcttatctcaccacttctatctcaccacctcaaagctctctataccaggacactccatgttcaatatctcccaaattgaatcaggtgaggaccttgataggattaccttggaagtctctagagcttcaccgtgacaaatcatgattaataatacaagtcgaagatttggcaggtggaaataaaactcccgccgttatcgccgcccccgctagaaaatcggccgaaaacttgaccccctcattgcgacttgccaggaattacagcgaatcaattagaaaggggactatgcgcaggtccatgtctctttgattactctcggtccttcaatcttcggctttcctgttcactctaggattgtcttgattcgtttatcctatacttgtgtctgggcattttgtgttgtcagcttgagagcaacgtctcgacacaatgggacttctgtatgtgtcttgagatgcttgatttgctatttgggatccctctaatataaagcagggcacttggaacagcgctggaatggccggaagccaagaaaaaggcgggccaagtacgccagtggggtatcgaggtatgccgcgtctaggtcgcaatgaaacaatttcaaggtgtctgacttgattagcaattacttgccaattggcgcagggcacgaggcaaagaacgcgatgctcttctttggggcgacgaggtatgttgttctggcccgcgtatttcccggtcgcaatcgctaatcaatgccctctatgatagattgaatacctcgtggtagctctggacgacgcggcgaagaaggcacggctatctctagcccaggctgagatcctgatatcacttgcaagagacgaggagttgtggaagtctggctccggcaagcgcagtgcaactggagaccagtgagtgtgattgatgtccaacaggaactagcatgtctgacatcaaccagtgaaggagaggagccgcctcatttccaccccgaatttggaaggttcatgttggaggctactcctggacagccttggggaatcgggttcaaagacctcctcaaggtggagtccaatatgaagtggaggtgagctctttagcaatacaacttgactcgaaacatgctaatagaccccaagacgagaagttgcgaaagcacacatggctccgaatgaagtccccatcaccctcacaactttccctcggctaggaaccagtgatgactacatccagccatattatcccccatctgggccagctcttcgctcgcagtttgttcctgatgagattgccaatccgcatattcgattccctactctggctgccaacattcgatcccgaagaggtcgcaaggttgaactgaatgtacctgttttccatgacacaaatacgcccaggccattcaaggatccaacagttaactacgaccttcataattggcccgaggatgatgacgtccgcaacggcgcagccaaagatgaccatgtctacatggacgccatggcatttggaatgggcagctgttgcttgcagatcaccttccaggcaaagaatatgacagagggcagaagtctttatgatcaactgagtcctttggggcctattcttctagccctgaccgccgctacacccatctataagggtttcctagtggacacagatgtacgatggaaccaaattggcaatgcagtcgatgataggacgcccgaagaacttggcgaagctgtaagttttccagaatgatacccttagcccagaactgacctctcgcagcctctcaagaacgaccgatggagaattcccaagtcgcgatatgcctctaattcgacttacatatcccaggatcctcgtcttcggaaagaatatttcgatcctgatctagttgttgatgaggatattaagaagcgccttatggacgggggaatggatgagctactcgcgacgcattttgcacacttgtttattcgtgatcccttggtcattttctctgaggatcttgaagaactagatcttaacaagagtgaccactttgagaatttacagtctactaattggcagcacatgcgtttcaagccgccgccacctgataaggatgatatcggctggagagtcgagttccggtccatggagatccaaatcacagatttcgaaaacgccgcatttagcattttcatcgtgctcatcactcgtgccatcctgagcttcgatctcaacttctacatcccgatccagcgtactacagagaatatggagacggcgcacgctcgcaatgctgttcttgatcggaagttctggttccgcaaggatcccttccctcgcagggtgcccagaagcgcacagcactcggcgaacggcagcaccttctcatctacgacatcgtcggctattaacactccgcctccatcgcctcctcttggccctgttgagacagaatttgatctcatgaccatcgatgacatcgtaaatggatgcacagatggatcattcccgggcctcatcccgcttgtggagtcctacctcaacagcgtgaatgttgacgtcgagacaagatgtttcctggccagctatctggatttgatccggaagcgggcgaatggcactctttggactggggctcgttggatgcgtgagtttgtagctaagcatcctagctacaagcatgacagtgttgtgtccgaggagatcacctacgatctagtgaaagcggttgaggagatgactgccaaagagggaaaaaacggatcagtcggatgggaacttcttcgaggcaaaaaggtctagactagagcatctacatacccccacaaatagatatccagagtgtgagcatgtatggcggaaacttgaacaatttgcatatattcatgacaatcggggacagcctccttgtcacagcgtctgatgaatcttaatttctcatttctcagtgtctccaatagtactcattccagcagcatttcctcctcagtcggcaaccgacacgagtccgccagcccagtcaccttccattcgccgttgagcttatgcaaaacaaaaagctccaccccaacatgatccaccacgccgttgatcttcgcccggaatggcgcccacacagcggccaggttcaggctgcctgtctcgtgcactttcacctcaggatcccagatacgttcatcgatatcgtctttgagcccagcgacatgttcaacgaacgaaccaatcgtacaaaaacgcagggaagtcggagacggaggcgagagtgtcatccctcctgctcggacacagtgtttctcgaaatcagtgcgcgacttgctgctcagtgctgcgaggaagccttgcgtgactgcgataatggcggctgtttcttcggattgtagttggattgctgccccggtgcgagagcggttcggtaatgaccagcacattgatggcatgatttagatgggagaaagcatcaacattgttatattttcgatcttcggtttccaggagcaaacatgtcgatatacgtgtacctacatatgcataccactattatttaggccacagctgttaccgttacagtgcctgtcggcctgttgtttcggtatgttacactttgtccaactttgttcaatttcagggatttcaggaaccctgcgatcttgctgtcgtacgaggataagtgcttcgtgtcacacatcgactttggtgcttggtccgggtttcgttttacaatgttgacgtccgcttttggttgaatttggtgttcgtgttactatcagaggtctgtggtaactctagctatgggtcaatttatctccttttcctatgcaaatccccgggccgagtgcaaatgtatccttgagatctttattcacttacctcggccagcgcaaaagcttcggttaatcttcggactgatcaacatggcctacgactaaagcaggcaatcgtccgtcaaacttttgagaaaatggccatgaagccaaatacgccagaacatcctgaaggtgtattggtggatgaatagccatcccacctctccgcttcctgccataatgcagatcctactccaacggctcatcattccaacctgctacgtatcttgtccgctacgatcagagcaaatatcagccgtccacatctcccggctgttgatcatagacgattcaggtgattgtggggcttccccgcatcaccaacgtcctgagaccttccagtaacgatcctatgtataccccggagtatataaatgaaacatgaaatgccacacattgggagggctagagcgggcaagggcgtgtccatttataccatcatgattggatttgcagccggctttctactatggacagtagtccatgctgtccctaaaaaatcatctcccacagcggcagtgcgcaatggaacgtatgctggagtgcggagctcaacctacaatcaggacttcttcctgggtataccgtatgcccagcagccggtggggaatttgcgctttacggtgccgcagtcgttaaatgctagctgggatggtacacgcgatgcgacacagtattcggatatttgtgttggatatggcgtgagtatgattctttcggttgctttccaaagttgattcttaccaataagaaatagacggactcgatttggtactctcagtcagaagcatgtcttactctgaacgtaatccggagttcatctgtcaacacagagtcgaaactccctgttggggtgtggattcatggcggtggattttatgaaggctctggtgctgatgagcgttataatatgtctgcaattgtggagaagtcgtatcaaattggtatctccctctctcttggatacttgaagcctggtctaacgacgattcaggcaaaccgttcatcgccgtcacgctgaactatagactgtccgcatggggctttataagctccagtcaagtttccggcagcggaaacaccaatctcggattgcgagatcagaggctggcgcttcaatggatccaggaaaacatcggcgcctttggcggcgaccccacgaaagtcaccatatggggcgagtcggcaggtgccatgtcagtgggataccatcttacagcatacaacggacgagatgacaagctgttccgggctggtatcatgcagtctggggggtcgatatccgcgaatccgggaaattacacgacgttccaatcgaactacaacacattggcctccaacgtgggctgcctagacgtcgtggattcactgcagtgtcttcgtgaagtaccattcgagacactcaacgctgttctcaacggcacggggggcaactctgactacaatttctggcccgttgtggacggggacttgattcagacatggggtagcattcaactaaacaagcatgcattcgtgaaagtccctatcattgccggcaccaatacggacgaaggaacagcattcggacctacggggatcaacaccacagagcaatggtatcaatacttgacaggtacctaaccaaatcttctacactgccacagcggctaaccctccagacgggggattggacttccaaacacccccctccgtagccaagcgcatcctcgacctctaccccgacgacccctcgcaaggcattcccgcatacctaggcgaccagcgcgtgccctccaaagggtacgaatggcgacgcacctcggccttcgccggcgactggttcatgcacgccaaccgtcgacgacaatgcgaagcatgggcggagacatcaacgcccgcatactgctaccgctttaacgtgcactcggcagacacgccactcctttccggcgtgacccatttcgaggaggtagcgtttgtgttccacaacattgccggactggggtatcactacggcaaaccgtttgccggggtgccgcagtcgtacatcgacctcagctctgcgatggcgggcatgtgggcgtctttcatccacgacctcgatccaaacccgaaccagggcgttgtgaaacccgctgtgtactgggattcttattctagggacggacctgttgatctctgtctcgatgctaatacgaccagtcatatggaggcggatacatggcgccaagacgggatcgattatatcaactcggttgcgcgggctttctggcggtaaagggggttacactgtgattatagaagaaatggcagatggcctagattgggcttacaaatgaatcccaaggtcgaatcggatccgagggtcagggccaaattattaaagtcgttgaaccatggttctttctcttcatatccactcagcacgcgggtattgcatcactgctcagttgccgagtggatcggttccaaattatgccaaacacaaacaaatatgtactagtactagtatgtatagatggagtactccctgttcaatatccaaaataaaaacagacaatctacaacgtacaggtcatagccgaaaaaagagtgcgtcaactgtctcagctctagtttgtctgaggccgcgtgtaatctatagacgccccgtcagacgcactagagttgtagatcgacatcgcgatccaattccacgtctcactagacacgatttgcagtcagctcgtatcccgaaccatggttgcactcccgaatcgtccggaagatccaataatgcatttttgctttttcagacccacgatacatgtccatcctgaaaatcagcccgagtcataagttgtagatgagacttgatatagtgggtcgctaagcatccctttacagctacctatattggatgcgcactatagacgcctatcgcgcggatcccaaggcaaatccaggttggacgaactaatgtcttcaccacggctacttaactaaccaactacctaaccaactacgtgagctggttaccagttacggacaggagaatagacatctcagacatctgacccgtgacgtggccgagcttagaattataaatccactccagctatccatggatataggatctcacatgccgatacgatgccagccagcctttgtttaactatgggtaccagttctacggaaattggaatgcatagcatatacctacattcccaagctcaccgccacaattccagcgccggcctgggagccagagccaatctcagatcgcagcgggagatgctgcattgagtaaggatctcagcaagatcggggcggggctgaaattctacgatttgaaactttcatgcagggctagcttttttaggatggttgcctccttttccaaggagtgtatgcatcttcctgcaagccatctggaagatctcgctcgatccggggtttcggggcagatagagatacagatacagatcgatctcgggagtatgcacttcttattgaacttgtatacctaacaccttacattgcagtatgttgtatcctgatatagatatatccccctgtctacaaagtattgtatgtatgtatcatctcccgtattacacatacgcaaacacagatcagcaaccaaagcccctaagccaagactggaaccaatagtcggatccaaccggccgggaattcgatgcgtctccacccatcgccccacgatcgcctactattggtctcagccagatagacttttcactaaaaagggtatttccgggcactcggtttcaataggtcagcccacctttcagcaccgatgtcaagatggagtcagccgcgagatccagttcgcacccgggaacgaccggttggggagtcaaaaggtaaacgaaaacgaaggaatttggcccggggttgggccccagcgaatcaggtggtcggttgatctgcgggtatttaggttttggtttggtgaagaagatcatgatattattcttcactgatatagaacacacctaactacaacaaacatagtgcaatatacgtagtacgtaggacgttgaacttgcgtgtcggatagatccgctgcagttagtactgtaatgtgtgcatcttttattctttagaccaacaatagttgatacaatggaataataaattatacttgtacacgaatgtacagatcctaatgcaagtccgttaactattccatctccacggcgaagtccgatacttctctatactgtaccaccgcaataacccacgatataccacaagcagcaaaagcaagaccgaagaagaaagaagacccaaagaagaagaaccttacgctccacccgactacgcccaaccgggcctggcgccagaggcccgagagcattcaaataccgatctacggcgtaccaccgcgcgcttcagctgacaaaaactgaggtcgcgtgggccctccaggaatacaccgacatttctttcaaacagagttctgacagcagggaggaaccgtcgtctccacagcggacgttgttcgcagttcgcagtgaagtattctgtaaaggagtttcctatatgcgatctacaatacggagtattcgtcgacgatctcagtaactagagtttctcggccagatccaaggcttacggcttataggctgctagggacgatcagcagcgtcatacatattttcgatactgtacatactgtgtggtatagcacgtccacaaattattattagctcgtggagatattccttctccggatgtactccgcgtgtactccgtagtccgtactgctatacgtatacggaccgactttccactttccgcttttcgctcttcgcactgccgagtgcactcccgtgctgtgttgtccaagcgcggtggatggtggatggatacacgaaagttcgctagtccttttttctttcttatgatcctccggtacgagatggagattttcacggagaaccgtagggtctgctgcgccacaggaaagttgtggtgccactaactacccctttaccatagttgcccagtccgtagactgaatatagttacataactagtagtgagataatccatcgtggggataagcggctctcggtggatctcggccgtgtttcgggagaatccagacaaagaaatttactaggaaaaatctgttttcaatcccgcaaggagtatcgtatcatgccatgttgttccagtaggtacggagtatgtaacctaagagctgacggtgtccacctagttaggggggacgaatcggatgaatcagcgtgtcccaaaacggaatctgctttcgagggatccttcctggattggctgtgcgccgtggaaatataaacccgtagacagaggtatgtatacattgtcagcaaaattagacagccgacgtttgtatagggtacggctgatcgcatagatccccaccgggatagatgaacgtgggatcttgatctgggatcgatctcgatcgatgccaaccctgctagctgaatatgattatggttatgatcctcggattattggattctcggggtaaacgatgttccgtccaacgtaagcacaagaaaacaaacagagaacacttgtactaattgtcatcaactgaaagtcaaagccgaagaaaggataaaagaacgttgctacttcctaagtgggcttagcgatatccagcccgcagactatgcaaactctccaggccaccggaatagccaacacctccatccccatgtggactggactcacgaactaagctgtcaaatggatctcaccttcatgacaaatatcgagacgcggcttatgttgtgatccaccggcttattattccttacatgcggaagaatgtggcggtctgtaataaggccacctacaacatgctaagataaatacaagtgatattgtagtaccccgtacatgtctatatcgtaaattgcttatatccaatccaaagaatgtattggccatacccaagccgtaatctaattttaatctaaatttaatttgagatctcatgcccgatcccgatcccaatgtagatcggatctgattatctgaacacaaataccttgcagcgaatgaccgcacgccgaccccccgctagttcaatcggcggaaacttagttctcagtcgggacgatctggtgagttggtggtctttttattggggaatttggatgtggaaaatttagacgatcagctgggatgataactagttcgttgctccatatatggagatctttctggaacccgcgaatttaaatgacaatctaattttgatatcgcatatattagcctaatctgcacgttcaatatctagggtagcgaatcagggaggatcatgccatattgggatgtctacgcttatgagagatggatgcgacccaaagaaaagagatcatgccataaagttaggtgtgaatcagattaatcgagtaaagatctgtagtacaaattcaaagttgagattttgatgatattcaattagtattgccatcccgagccaattccagggatatccatatccaccacagaagaaaaaagtgtcgtaaaccttgaacgtcgaaaatatcgaccagaacataaaatagatgtaacgctgaatgagacacgatcgtacacatatcatatcagggacatactcgaacagaagtggaaagaaccaagaaatgcagggtattgagagatagaggggaacatggaggtaagaacagaacagaacagaacaaaacaaaacagaacatcaaaaaaaaaatcaaaaaagaaaccagtttcagaccaggccgatggctattgaatcatcaaagggggatatctatgctaaagccgtttttctcccagtaccttggaagctgttgggggtattataagaacaccgagtagggaagagccccaaaaagacaaaagaaatataaaaaaagatcacaaagggaagacgttagacctcccaaaagaaaaaaaaaaatggccactgaactccgttgccttctatttcccacctttttcaacgccgaaaaaagaagctgaatgactgagaagctgactgagaagctgagaagctaatgactggttggcgaggaggagtcgagaaccgacttgggcttgagattcgaacccaggctcgccgctttgtgagcgcccatcttgcgagtcaatttggcgtaatgtaggccgcatgcgttacacaacgtccgggcaccatctgggccgcgacgccattctggcgtttcggctcggttgcagctgtggcaacgaccaggaggcgcggctttctgcaaacgggttagaaaagtgtcaagatgtcaatacaggggaaagtctagacttactccgcgccgtttctttgggtctgcgcctgcgaaaccgcccgtgcctttgaagtcttcctggtacatcgccatatggtcgtcttcggtcttgaacgccttgcgctgcgccatctgttcagccagtgcttgctcctggttcaccacggcggtgcgtatccgaatcagggcatcctggttccgccgttgcatgtgaagcatgtcctccacttcgttgagcgaagggagggagcctaacagcgggccggaacgctgcgtttgatgtgcgcgagacgcgtagtgccgtgaaaagtcgagggtgcgcgtactcaagtcggcgagctatttcagtcagtaggtaattcatttaacaagtcattcttgattttgtccatcggttcaaaataagactcaagggcgaatccatacctcattcaaagatgtctccacatcatagacgtccaaatgccgcttagactcgttgtgcggagctagtcgactcacaaatccacccttgacctcttccacccgtggcgcacccatgtaggcccggttatcgtacggagccggcgccggaggatacgagtggccggactgcggttgaaaagagtagttcggagggaaatggccgtacccattcggcgacgccacgctaccggcggaggttggcgcactgtactcatacccggacgaattttgcgaccccaccgaggtgattcccgttttggcgctctgggtcggggattttcccgtgctgagggagttaagtgaggtgcgcgaatcctgtgtgttgatggaggcgagactggagcgcgatgcatcctgcagctgctgatggtacgcgggttcccgcatgagagaacccgtcggcgggccattcgaaaacggattgggcgggcccgctggtccctctgcgctcggtcgtccgatgagatgtggcggcggcgtagggtgcgaggattgtggtggcggggcggaggttgctgctgggtatgggagagggtcgttgccgagggcctcgtggatggatgggagggactgtcttgaggtgcgtttttccttctcgtcttcgagggcgcgacgggcctcgggcgacgagatgtaccccggcggtgcgttcgcgtaggcgtacggcagggattggccgtacatgacgttgggactcatcagagtcggagaagcggtggcgctcgaagggtgtctggaggtgtatcccgatccgtctttccctaggaaactcatcgccggcaaagggtctctgtgacgaaggtgagcaatgggagaccgactgcgaggtcgcaagaccaacctgtgcctagatgcggcttccaaagaccccatcacgttgagaggagagaatgttgatgcgacaggtctgggaggtgagaagaagggaatgcaaatgcaaagtcggaggtcgcctctggtgcgacaggaaaagcgttccacctgttcgtgccgaaggaaaaaagaggcccagatccaagatccaatccaacgatcccggggcgaaggttggaaagtggcgtttagatggagcccgagtaacccgacgagttaaccgtaattaacttcttttcttcttttcttcctttttccttttttttccgttccctcttttttttcagatcaatgaaacttgggaaatcaagagaagagataggaatccaagaccacaaaggtaccttgaaatgcaaaaagaaaagaaaaaagaacccgatcgcacatgcaagggatataaagcgtggaaatgagaatgtccatccaaatatgaaagcacgaggtggaatggggacaaatataaaagaacacaccgtagagaggggaaaggcgcagaatcaaaggggatcgaggctacttcatttcgggctttagattggaaacgggaagcttagagaggagtacggagtacaggaagttaaattgatttttgattttgaattctataaaagattaaaggaaagaaaagaaagcccaaaagagaaaaagattaaaaaagaaactttggcaaaataaataaaaaaagaaaagatcgagatccgaacagggggaaaattaccctgggaaattgccagatcgtcagaacctggttttacaaggcaaattaccgactgcggatcatcgggatcttagggctttagttatctgtgggtggtgggtagagctgtggatagaggctgtgcaatattgtagttagcatgacatacaatataattacatacttgtccgaactcatctggtaatgttcgatacattactacgatgttgatgttgtatgttgttgacccacaccatccaatatctagaaaaaaggtaatcaaatgaactgcaaaatgaactaatttaaattaaataattcagaaattagcctaccccggaacctaggatcgatcgagattaacggccgattctcaacgtgctaagggacggctgaataccggcagagtggtccatcaggaaaagaagctagcggacgatagttccagtattctggaatcagtattctggaatcaatctattcttatattaaataacaaatagcgcagggcaatcatcgagtcatttccagatcgctcgacgaggatatgcacccgtgtcacatgagagagatctccgatgcaagtgggtaaatgtcagcctcgggcgatgagctaaagtcctggggaggttataagtgaaggatatgatgtcagatctactataacatagtaatggttagatccattccctggctgtattacagatgcaacccaagtgccaaggaacacaagaataatcaagatctctggaatggagacacagctatttccatcgcaactgggggaatcagagacgtggctgaggttacacagtccgatctgaaagtgcccgacgtggtccggatgacaacgttccatggttcactcgagtttaaattattttatctctttgtttatttatttagcatttggattcattcccgttctacttgacatactaccatctacctatgacttggaatatactatgacatatacttcagatgcaatccttaagtatccaaatactacctacgtcaccgagccacaacgtccccagccaagatcgggcgcaggtgaaatcacaaaacaaaaagcaaaaaacgccgccgaaagcaattgaaaaacaaaacccaattaatcaccacctcattcgtccgtctgacacgctacccccttgagtacccgcctaaaggatcggatcgcagggtattgcaacacatgttgcttaagctttagatcgagatcgaacacgggacgtttattggcgagatcgcgtgggcactccatctcagtttaagaccctgatattacagtagagacattacagtagagctgattatatataagtgagaatcagatacggaagaacagacagtcctagcaaagtcccgcatcaaaccccgctccgatagtgcctagcgctgtctctatagtggtttggaactttgggcttccaatgactaattccaccgattgactccatgaccaactaactattccgtgcagctcgcaaaagcaccgaaggatcaaagctcgttaggaaaccaattttctggagctttgagtttgttggccacagccccaccccgttggatgtcatattcgcccttcacgcgctggcatgtggacgaatcttgtcttggctacggaggcacggagtactacaaatcaaaattctccattctctagtttatcagtcccagtccctagcggtggcaagtacaactgttatagcccgattcgcctccgtgatcgcacagcgcacagactcgggacccatagtgatgtacgatatacatcgtatgggccaacggtcggcccaaggtctaaatattgatccaaaaccggtgaaaggtaatcgcgtgagatcttcggaatatcaatgcggttgatcgacggaggacgcctgaaggaatatgtaatctcgatcagccagccatacggagtacaaagaatatatgatatcttttccatgcataagcaagagcaaagcccggtctaatattccccaatatatattgagtcagtaacaaggctcagctcagctcatgcacctcggtgtttaagaatgaatgtagtagcgtactcgcataatcgcgaatctcatcgcacaatggacttgttgacgggtccgaaatcatcgcgaatcgatctagtcagtagtcgctgcatttccagagcccaatgcaccagccggatcttacgatttcagccactctgcgatgcattccgtgcgcactggagatttagcgcatgcacggtaggtcacttccacctgccgagcatgaatgcagtaaggatctggcgctgcgattgggggggattctccacctgcaggataatggcgcaagaataatcccaatgctgaatctgaggatgagactgatcacaagagatctgaggctgaactccctgcgacggttacatttggatatagtaatatagaaaaagtacatcatacgacaagccaagtgtggctggggcgaccgtcaggggcgaatttccccgcgatgtctcgatctgaactatcagaatcgcaactggtcgcactcgcactagcccggtcgcaggacgctatgatgatgatgaatcataagtataattcctgtggttgtttttaatacgggggaaaacagagctagttttttatgtcagttattcttctggttgcctttttacggcaactgggagtgcaggatggattacagacaccgtgacggtggttttttatgggtcgcgttccactgtgaatatcacgggttttgcgattgagctagctggtggagaagacgaaaatctctgctttcggaattgaagatattcagaatttcacgtgtttggctggaggtatttgagatggccgcaaatgcgccgaaatttatctgtagtaaccaatgagatgattctacgagattatccttggccaagcgcgtcttcctcctatttacttttactttacggtacaaccgctagtaggaaaatcattgcctttgcagaaatgactttacaaaataactggagacaacggggaccactggagatgatggagacaactggagccatgatcgtagtaagttgatcgacaccgttgacagaccgttgacagcccgttagccagattccagaccgttcaaacattcctggcctcgtcgagtctgacaaaaacaatcccaggaatgttgtagcacgctatgatgtttccgaccaattgtggagaacacgcgataaacagacgatcccagactcctaaccggaaagagatgagcgacaactcattttcctcaagttggcaagagtttaggatgcgatcccaattttagtgcgcgtcgagggaggactatccctttcctccgacatcctgaacttatcaaactatatcatccataaaaggggggtaacctcccaaactatctgatctatgatccaagactattatggagaaaccaatctcagattacagattcatcaatcagccaagaataatcaagaaggtgatctcaatcccgaaaataaaagaaacatccccctcggatattataaggccagcacggttcacgtccgccgtacatagtaaaatctccggcaatagccccagtcacacatcatgccatcacccgcgactccgaaatgtggcggctcaggagatttgtttaattcgcccggtggggacgttcccggggatctctccgatctggacggagtaggctcgaaagagtaagttgacagctgcaagttgaccaaaggacaaggacaggggggggcagggagaagaaagagagggtccgatcccgtccagggattgaccaaggagagacggcacggtggggaagatggggggtttggtcttggaaatcaggacacatctgcaacgccaatctgcacgtacggcaaaggaacggcaccaacgttgactggctcggtttggggactagcagggttctgacacggccggaaagggataggcgatatgacgggaggtgatgtcctgcaagatgcaagatgtcttagtgtgtcttactgggctacagattagaccgaactcctcatcgaagtgttagatctagatatcctaaagttgggaatgtcttattagctcggtcaaattattggtaagggcccgctctatagaatcaacatacgattatggtgatattcccccaagtcatatacggagtatgggttgaatccccactggcctctatgattcaacgacagctgcacgtttcaatcgtccaagcaacagctcagggatttactccttcttctccccatgtggattataatcgacagaccgacatttagaatctccacggtgacaaaggggaaatcaccaccaaggaaaacggggaaatccagccggaccgttcccagactccaccaagcccataagatagaccgcttcgatcggcgggaaggatttcgggttttggcttgtcgggtttctcttggaagttcctttttgccttttctttttctttttcctctagctagcctaagacgggctagctcacgcgaaaggttctcctgagattaacacgattagtggccgtttttacttccatctacacctgaaataggaaggcaggtccagcatctccacaaatcccgaaagaaaccatgatcgcctgggaaatctccgagcaaaggtcggaacggactagcagcgcgcaaagtacgtgaatggtatattgatagcgtcttcacgacgatctccttctgctacggaagacagacccgattcatcgatctacgatggatattgcagccgctaagcagcatgcctgacaaacccttcttcaatctcgaacccacctcagcctaaccaggccggagccgagggccaacggagattaggttgagagattggggagattgcaactccatctgctactctatactcagccacacgaggaaatgagaagaacggcttggattaattaagatccgccggtggatcccgagtggatagcgacattattccctccaggtttccatctttccatggggctccatttctggaatatccgagattgtgttcattatatttacggagtccgttttggtgcggagctcgggagttatctgccgttgggcctgtgctggttgcaatgatatacgtactccaatgtgtgcgaaattggattttgttttttgcgggtcgagacggagcacagttgctggatttgtcttgagatttgctgccgtgtgggggggttgtcatttctgggcttgataatgttgcagtgtgcatccgttgggaggtatcaagcatatctattttaagcagatcgccgtttctttgccttttgggtttatttcattccagctaccggatagaggatggcgcgatacattatatggttgaccttcggcgatctctcgggcactttgagtcttccagatctcagtacggcacaacttgtatgagtgcttctgcaaaggcatctacgtatgatggctgtaagattgtacaacagacaaggcaatcacgtactataaacaaggttgtacatgcagttataaatcatatgcacggaaatccatccgggcctgattgagtgacggactcgcgccacatgccggtgaagctcaaaacgcttcgctattggacaggttggatgatgatcatattggataccttccccgtcgctgtcacacagaggactagcaaggatgttaggaccaaagcttcaacgaggttgcttggcaacaggttatcatatttattcttgatattattcttgatatttgcaattagtattactactccgtaggagatctttttccaaacaagtggcaaatgcatttctcaccttcctgacttgtaacatcagggatttcaatagtaacagatatatatacgaatgcgagggttgatacaaccgcgccaatcacattcatgtcccagtccaaactcaaagcgcgaatcgagggtccagtccagatgcacatcccaagctgcaggtatggcccattagagccttgacaggtgggatatgcacccaagacttttgacgtatgcattaggaacaagcctagccctgttacatatcgctttggacgaataggatcccgctggtgatctcgaatagagtttttcctgaatctgagctaccacacgccaaataggaagtcttccgctgattggagagctttgaatctgacagctgcgcggttccgacgttccgcctgaagagaatgccatttggaatttgatcacttggaatttcgcatgaacctgagaatgccatatttctcccctcgaagttgtatttttatgttttctctgtttcttcaaagacaaaagtacgaaatcctcccgctttgatctcacgtatccacccgatccttgttcactcatactccgtacttttatggaaatctccaatggaagttaacagaaagaacgggttcgccctgagtggccctcgtacgatggcaatttgagaagcggagccggccagaaattttcggttttatgttttccccgtacatttccctgccaatgggccaatgacctatctcaatgctatttttgtctcttcaaggggaagataactggccgactagtggcaatgggcccagcggaaacagatgccatcgacaagcataacccaaggatcggcaaatcgtcgaatacactaaaacacatgggctgggtccccgcagatccgtgtcatatcggttgaaaggggaactgccgtgaaaacggcggtccacggttgatctgacagggtgtggtagggtcttcacggtggggagaggtgggccagagaaaacacgcctccactttcaataattcccgatgaacgccgtaatttgatccccgataccgagtgaaggggcctgtacctaaccccaacgcagtcagggcgccggcggtctgggcagcgtgggcaatggatttacgcgcctactccttctccctttgagcaacccggcgttattttatgggcgtcaatagtacatacatagtaccctccgtgctcgagttccacctctgaagaaacttcacataaacttcgataatcggtgttgtatggcatgatggcctgatccactgggaaaagggcatccatgtgtcaccgcggtctggcgccaatcaattcgtcgcctgctggcccctccactgctgtccacgatgccaactccctgggcctggctctcgggtcgacctactccgtaccttttctgtttcggatcttatagggccaatgataggagtcctgggcccgaggcttgagcggcacagaagcgtctctttaggctaggtgcaggcggtaatgcaatgcagcttgccgcatggagtacattgcagcgggataactcgaaacagatcctgactatctcgtgcggagtgagtacaaagtacaaggtacagggtagaaagtacaagcacatggagatgggtattgtatcagaccgagtcaggttctagttatggtaaggctgttatttgtcagggctattgtgcttgactcatgagcagggacatattttcatattgattttaccaatataggataaggaaacatttgatcttggtcttattccctcttgtattgtgcttgatcttatgtatgtgtgaatatatataatttgatgcattgatgcgctgatgcatcgctggtttcaccgtaccaccaaggttgtttgcttcaaagcaggctacatatatatataccactctctatcaaaatatcaactctcctttacatctccatctctagtaaaagtcatcaactcatataaacacaacggcgtgaccatgcctcgtcgagcggcccgtgcacggagcttggcctatccccactttgagcttccagtaggacacaccttcctcttcaatttatttttaggtccagttgcgactagattttttaacgtcatgtcttcaatcctagttctggctgatattcctaccgtgacacttctgtaccgtgcaaaaaagctcattccttcgtcctcgagatttccgccatcccagtctctcaacaataccatctctatcatccgcaatgacatcaccaagctccaagtggactgcattgtgaatgctgctaatcgttctctcctcggaggtggcggtgtggatggtgcaatccaccgcgctgccggtcccaagctacttcaagaatgccgcggtcttgatggatgtgacactggcgatgcgaagatcaccgatgcctacgatctgccctgcaagcgtgtgatccatacagtcggcccaatctacagaaaggaagaagaccctgtcacgctccttcgatcctgctatcggcgcagcctggaactagcagtcgaaaatggcatgaagagtgttgcgttttccgccatcagcaccggaatatacggctatcccagtcgatacgccgctgaagatgccatcaaagaggtgcggaaattcctggtcgggcctcatgccggaaagctggagcgtgtcgtattctgcaactttgagcggaaggatgtgattgcctatgaagaattcattccgtgagtttattcatttctcgcttttgagcagatactgatgatgactatagtgagtatttacctcccacgccggaggacctggctcagagcagcgacgcttgagtagccatgctaaaatgttgctcgccttgcttggtacatgccccgacacgattgacgaccgctactacatgacctgaacgaaacataatctttgccagcctgtaataccacgatagctacgaaggagatttgctaaatattctaaatattccttgacgaatcgtaagtcccagtgtttctttctctatactggtaacacgtaaggcgaagatgagacattgaccagttcgtacccatactacagctgtcatatcagtaagtgcgatgttatcgttgagatagtcctgtaagcagcttctttcctctctgtattatctcgacgtagacaagtatcttagttacgatctcattcctgagatcgtccacaggtgaatgcaaacaatgcaaacacctatcagatcgcgcctcgatcacgattccagctcgagatgacttcactccaattccaattgcaagtctctcgataaccaaaaccgcataatgaaacacaacaaccctcactgaacaccccatctccaacaaaaccgatccccccgcaaaccccccaacccctcgccctccgcccaacaccaaaaaatgtcaaaaccacaccggccaagaggaataccaaccccgaattcacggtaccgagtgcaagtccacgaagagccaaagcccaaaatcccagatcctataacatacgagggtccatccctctccaaaaaacgaacacccttcatctcccatttcttcacgaacctccgccaacgcctctccgccctcccatacccagtccgacgagcatgtaggactctcagctgggcggtaccgatgctcccgatcgcgctcttcattccagaacacgtaatgcaggtgatgtgggttcgcgggccgtcaatgacaccatacctgaacgaggagtatgagcagacgcacacgaagagcgatatggtcatggtcaatatgtggccgtggggatctatactgccgtttaagaaagagcggaagttggagcgggggatgattgttactttccggtgggttgagtgctttgctttgctttgcttttacttcgattttgagttttatatcttgttcttttgagtcgcgtgcagccaatactgatatattacgcatagctcccctgcaaacccgtctcatatcgcgatcaagcgcatcgtcggtctaccaggtgaccgcatcacgactcgcgagccgtgtctgcggaaaacgcagattgtcccctggaaccatgtctggttggagggtgatgcggaggatccgcggaagacgctggatagcaatacgtacgggcctgttagtctgagtctgattacggggcaggtatttgcggtgctgggaccgcggatgcggtggctgaattggacggactgggactctgataaggggaagggggagtctgcgtcggatgatgcggcgtatagacagagtgtgcgggaccgtgttctgaaggatgctgttcagctcgagcagccttttttgaattgatttgttatagatggggcttggcgtatatcttggcctttgtatttgttgatagtgctggatttcctagcgattttgactgggccttgtacatatattagggagccttgtagatatcattatattactattttgagtaaaatgctgtgctatgcgtgtgcgaaaagagcaagtttgcgagaacgaaaaaataagtgaagacgaagcgctataaaacaggaactgaatggctaagaaatgcagacaaccgaggaaatgaatcagcgatctagagaaacaagccgtatatcttcatgtttctcttcctggtgacggtcaatctccgaggaaatactcatcacccaacggtccttttccacacgactacgtgttttaaagacgatggtgcggccatgcttgcccagcgtggacacatgacgcaaggatcgtttggctttgccttcttcccctatttcctgggctcggaagtagctcttactcaagggttgccagatcacgaaggtgatagcagtatcctcatcgtgacttgtgaagacatctgaatcgagatacacccgtggtaaagcatgcacaccagggttattgctgtcgaatgtctggttggcatacagcaagtcgttttcggtaattagaccagaataaatatagcaatcttccagctcgatggatgtttcaagttcttgatggatgtgtgggatcacggtgccgtttcgccggcgcagtgtgctgcggaaaattaacagcttgcctgctgtaaggatgacatcgcattggtagaaagtggtgtggcgacggggcttgcggtagagggtgccggacatctgttgatgttgtcagtagggtgcatgtatttccgatgttacgctacataccttgatagtccgacaactagacagcgagcacatgttgtgcaagtgtggagatgcctcggctttcgacacctcccacttcttcgcgaactgtccgaaaacggattccatagcttcgtcgatacccaacagcttgagattgcgctgacgtacggcctgcagctccgtggcatcgtccgcgcagcgaatgtgccaatacttcacaagcgcatcaattcgtttgacccactcgtcccgtgtggcaccatcgtacgcctgcagtcgaacgacaagaccattgtttagaaccaattcaaatgttctaccgtcgtcaaactcttgcgttgccccgtcatcccgtcgtgagtctctggtttggggattgaagtccacagcaggtccttccccgatattgggatcagcagggcagctgccacgatagacattgcggacttctgtcacccgacacatatcgatatacccatctgcctggctgatattgtgtacattcctctgcacgttcgcaaaggcctcttcatcgtgtcgtttcacgaactcacgattgccgctggagagccatttaatcttgttactttcaaggggataagggtcgatatcccaagagagcggcatttgatccaatatctcacgggcacttggtacatttccttcttctgggggatcaaatttcggcggtgacgggggaaatgccctggctggccgacagaacaacaaataatgatcttgggtaaagaagtacagccgtttgaagaacatcttgttcatccgctgatgcacacccttctgggatgtgagacggactaggaatccttcgatcggggcaggttcctcctgtacatccggatgcctgattgtagtagagtaatgatgtcttggtcgtagctcaagctcgtgggatgactgcatcccaatggtcccatacatcttctcctcgttgactccaaatacccactcaagtcggtcgtaccgcttccaagcaagtcccatcttctcggtcttggaccaagctttcaagacctcggcccactcggcacggccttcgagcatatccatgcatcctcggatgatggtagcggcagcaaacttgtcatcgacggctggccggttaacagttggattgtgctccgtatcagaatcatctgctttcagcccttcctctatccgaccgaaaggattttgaaagatgagggaaacccccagatcagggacgtgaatagggagggaggtgggacgccgccatccaagcacctggcggatgaaagtgtaccattccgcagagtgcgccgaggactttggccgaaggataaatattttggttccatgcttgcggggacgccaaataacgatggtcttgtcgagaggggaatagaagttaacatgggtatctttgtggttaagctttacttcgtaataaggaggcgttttgctgttcgcacgttgcatatcaggaatcacgcgagtgcggtacatctgaatggcaaatggcgcatgctctatagagcttttgcggcatacgacgaggaactctcgccatttatccacggtccgcgtttccatgcgcaaactgtcattctcggtataatcggcgggaagtctgtcctgcagagtctcctccacgcagaccagcattttttctgctttgacaatctctccgtcctgcactttccggcggtgcggtcgcttggcagacatagtaccttgggtctttgcaatcttatggcgcatcttttgctccttgtgtctgatgttgtcacccaggttgtattttgccaccttcgcagggagtctccgttggattcgcgcatcttcgccagtatcatcttcatcttgtgggtcgtggtgttgaagcgatgctcgagatatgccagatagcttgcttttatgcttccccttgtccgtgtccttgttttgaatcagctgagttgtcgaatcggcctcgcttggaactatggatgtattgatggttagagggttgggagaagaatgaccggccaaatttgtatgatgtgagcccggggactttggtcgcagctcaggcggttccagactgctagatcgtacggtgggtattgatcgactggtatcagggctgggggcctcttctctggcggtgacaaacgaagatgaagcaacatcattgctgtctatgtcgtattgcccccttggtctggctttgggggtgctgtctgtatcttcgccgctgtctccttcgctatccccggtgtttgctctgtcatattccccgctatgttctctagtctctgtgtcgtctgccggctctgtgggtaaggggtcgtcaccgctggcctcagctacagggtgggttagggtcctcagttcccccacaggctctgctgcagattctgcctcttgtgtttctccttcaatctcatcacatcgctccgcagcagcatcatccgtgcttgtgttggtaagtgccaaagcgacctgctcatccaagtcgggtgacgctggggtgggctgatcgttgtgctcctcgtaatgggccgcaatagggcttgcagagaacgtgacggcatgcgatgtatagtttctgactttgagtcgagacctataccaagacttgcgatgaccgtgcagccagccttctggaattggaccaacgaaaaatctccggttcgtcatgtgcaaatgtttggcagaagcatgacgctgtcaagaaatagatcagttctgcaactcaactcaaaggatggtgacataccaattgctggtctgtgtatgagccagtccgcaagccatgataatcttcatggtatgacgggcgggagtcgggttctggtcgtgagccattggccccgtctggtggagagctcatgtcaatctattatgcagtaccctggtagaccaaatggcatgcaccagacatatgcaggagcaagcagatggcccaggcacagaactttcgatcgccatgtgatatggtccgatgacgtcgctgccaggtcaaacgctgcaaacgatgcaaacaagttgttgacacttcaccgcgttggtcttgtttactctgtttgcatcctcccgtggtctccacatcccccgtgccccgccattggcttgcgtggcagcagcggtgaagtcgataatatccaagggtcccctgattaagctccttccaaggtttctctttctctcactatctatcttctacttgaattattctgtaaaaatggctgctatccctgctgacggaacatggtttgataccatcaacaagtccttcgccgatgtccctattggtgcggacgatggcatctcgaccacggagttcctcgaggccgccgagtcactggtgactctcttcggtgcgtattgttcccttgcatagacctgcctcaaactaatgcagagaacatttagatgtgcttggctctgccgctttcaccccggtcaagaatgacctgctcggcaacatcaaggttcgtccacattataccgccggtgtcaacccattctaaaaccccaccagaaagtccgtgagcgccaagaggccgctcctgcagagtctgagaccctgcaggcccttgtcctgaacgaattgaagaccggcaagcacgtcgccaccgaaggtctggtctggctggtccggtatgttcacatgtctcgatcgtgaaatggccaattgcaatggcatctcttcgatttgcacaatctgcatgaaccattgactaatcattgttcttctcacagaggcctcgacttcaccgtccaagccctccgtaacaacatcgacaactcctccgcggaactctcagactctttccgcggtgcctacggcaacaccctcaagccctaccactccttcttcgtcaagcccatcttcagcgcggccatgtctgccacaccataccgtaaggacttctatgcgaagctgggtgaggatcaggaaaaggtcgctgtggcgatggccaaggaggtcgctgctttggagaaggtgatcgccatcctcaaggctttccaggctaccaagcctgctcagtggaagtaagtttgccctggaggccttaccactggattaaacatgtgcactgtgcaacttaatatgtaaatattcgatttgggttcattccagcatgcgagtttgtattatgtagcgaattcactgttttggtcaatctacctaggtagagcatggcgtatggggtcgagatctgagcgtcgcgcttataaatcgtaagcttgcgaacgggacccttgtaagaagtagatcagtcggtctataataggacacggcaagacaactcgcagcatacgtcatagcaagcttgaagttctgctgccaataccgcgcgttcggttcgcttgctcgctctcgttccatatgcgacgagcatgtacaaccgagggcagtatcacgacccgttgacttggtacggagtactccgtacacttgagtaggtagatcagcctctatctcagccccacaggtaagtgttccccgaaatgccgaggtcagggggagataacccggttatatatctgccgttttaactttgatctgtcatatccttaccaaaatagaaagggttccatcttctaccgtactccataccgcgatccaaagttagagagaatagcctctcggcacttaggtccagagggcctgacccagaagaccccgtgcgccaaggatattctttaccgatggtaagggtggcctgagagtcgggtacactgagacccatatttgattgtgatctaggagtataagtaaatcccggggtgatcatatattgtcacaataaggccaggataatataggctagatatacaatagtattgtagtgctcatactgatacaatagcagcttgacatataggtagtcagagaatggtccaaagacagcaagattgtcgggatgttgtgggtcagaagttagtgccaggtaatttccgacacaatatactgcagatcgtaccacctccgccgaggtccccgctgatcgagtgtttcgtctcacactggtgactggaccatctgaaggtcttcccccttaagaggagacggtttgcgtatcaatcagatctcgatatcgaaactccagatcagttcatgtccatcagtccatctgttcgagatctcgggcaagtgcgggaatatcgtcaaatatttgccaatagtttccttggcaatgcatgtcacaaaccctggtcaaggatcgtctactccgtaccataccctgggattgccaggttgaggataggcgggagtgcttcccctgacgacggatggcaactttggttagggcttcccgttgtagaatggtccgacactagcatcacggtagcatcgcggtatatacggagtacacaggatcacggactgggatcttttctagcgactccgctggtcataggtgattggcgggaatcagtggagtccatgggctggtatcatagttttttggcttcccgacgtcgtattcagaacagtcgcccggcttccacaagttcggtgcgacttctctttgaaggctagattccgtctttgcatgaagaattttggttgctggaggtgttattggaagggattgccgttttgatttgattttgagttctcgacctgcttcccccacacgtgaaaccttcacggtcccaaggttccagcagctgtctaaccccatcttaaccaacatgcatatcaccgttggccagggatattgactccgtggaggcttttaaacggggcgactttcttttgcctaattacctaattaacccttttcgccttttcttttcttttttttagaaaaatcgaaacaactaggatagtatcatggcccctctcatgttgtagcccgttctcgccactgatgctcgtgatcgtaaggcttgatctgcatggtagcgggttttcccttagggtagtaatttcctctcgctaatatatcgtattcttgttgctccttcggatatccttgcatacttggtagggaaactatacgggccatgaattggtgaccatacattcattctcccggtcaagatgttgcccctcgaaggccgcagcgagtcaatctttatcgttactactgtctttcttggaatttcattcattgccgtggttctacgatgcttcgtgcgcattcgccttgtcaaggcctttggctgggatgatacctttatggtatgcgccatggtatgtatgatagtttcatgtgcacttgaaaccggactgatcgaattgcagctgttgaacatcctgttcgctctatgcggtatcactggcgcattatatggaatgggccagagatccgatgatctcgtgaagaagggtacgatggaaaccgcaatgtttgtatgtccaccttcaattccaagatgaaaatcacatgctaaaccttcccaaagtggtggtggctcggtcaaaccagctatgtgtggacctgttcactagccaagatctccatcgcgttcgcgctcctccgcttgacagtctctaatccccacaaactcgtgttatgggctgtcattgccgtcacttgtacgattggtctggtcttctggttcatgttgacgctgcaatgccaaccggttgagttcttctggcaacgagttcgcctttactcgaaccctcatgccaatgttcatggcacctgcatggagctggaccatatcatcgccatggcctatgtctacagtatcactgctacaatttgtgatctgaccctgggtcttttgccgattgccctggtgtggaacctgcagatgaacataaggaccaagtctgccttggcgggtattctgggaatgggatgcatgtatgtctacccttggaaaccctaaaatgagacttagtactgacctattgatttagcgcgagcgcagcagtcatcattcgcattcctttcttgcacgactacaaggatgtcgacttcctatgtgagtttctattcttatacacactcgataagtgagatgatcaacaactaacaccacactcccagacgcaaccaccaacatctcaatctggtccaacgtcgaagccggcctcggaatcgccgcaggcagtctggtaaccctccgacccttattccgctggtttcgcgatcccagctcggcaggaggaagcaagagcaaaaccaagcgcaccggcggcagcatacccctctccagcatcaacggaggccgctccaccatttcaggcccgcaatactggcggccagacctagaccggccagaccaacatgccgtggtaacgacgattcacacctcaaatgggtccgccactagccggtcaagtagccaggaagacctgaacccgaaaaacgataccttctttcagggggtgaatgtccaaaaaacgttttatgtttcggaggatcagtcatgactggctgtgccggagttagataggctataatatatctaaactttaatgtttccttttttgctctttgccttttgctctttgtttagaacaacggcttgtacggagtacacgataataacgtattctacactgccccgccccgaccggcccccagattctattctcacacaccgggatccacgtgcttttgtcagttatcatgattcattacggttcgcgttcattaagtacatggtatggatcaaagccggcgaaaggccggcatacgctatcccgcttgtagtaacagtcccactctgtcttgctagtggcgcatgttccgatagcagttgaaacgagctagctatgccggatgacgttgtctagcctgagtgttgctctgtgtatcctctttgcgcaggcggaaactgacatcggtaaaggcggtaatcacatcatttttgacatatatttcatttcttttagattaactggctaagcgcggcacagtttctaattcgatactattttaaatattatgttgttcgaggcttataccgatattgcacggcatggtgtgagctcccaggggcttcgtgggcctatgatattgtaggaagttgctggagctgggctaattcatccgtgccctagcctggacccttattagcgtcgttcacacctaatgaatatggcaacaatcaacaactgactaactagttactagctatatgtagttatttgtaggcacgttccagttgcagggtcagtttcgagttctactctttgtctccgatatcgctcggtttcttcatactcgtagcagcaatacatattcccgtcgtctttactccgtagtggataaggcgtcttcggattgggccgacatggtccccgcttcgttatcagatgattccccgggttgaaaactcgggattaaactcgaggcgcgcacaagtgtcgtgttgggagagccgtttgagcctcttggccgcaatgaatgaaattccacttcatccatgttttctcatgattctcgagatcactggcttgggataaagctgcagaaatgtcatcgtttcaaaaaacattcggagtgtctgctagctctgttgattgatcctcttcatccttaccggctgcttggattctagcagtacgagtcaaatgccacattagattgagtaataattggaattaaactatagtgtatgtaacgaagaaaatagtctgcgatctgattcggatgtgcgctgatagatagggagaaaagggcgagagctatctctctagtatgtacaaacgggatctggtccatgcaggcatccaacagtaactcatatgaagatagtggccgattgatcgggtcatcggccgtagccgtgaagatttctcgagtgaacctcatctatatgatatagttcatgtctttagcacagcggctatgtattttggatctttgctctcgaaactttgaaagaatgctcggtggtcgtcctagcttgcggctgggatagggagccagtgaaatgcgatgggcatcggggtcttttgccttggtgatataaataggacaagagacatatgttgatatgccagatacaaatcatgttcttcgtgtcaggaaatatagcctcaatggctttcatcaacgcctcttctttatttgtgagaatcgtagggggatattttaggccaagcgattcatacgcttcggcgagacggtcaaggatgagttcgtatgtgtcctgcttctcgttcttcatgaaggcgaacccaatatggaaagtcgatcctgtggctgcaaagccaacaatggcgagtaacggaagaccgtagcggtttgtattgtacgtatgatccattgatatgacccacaaatcagatttgagcattgcaatatatacaatattgcacaatcctggtatgcgaacttgggttgccagagtgaagttgtatgtaggctttgtgttcatcaagtcttcgcaagctttcggcctccccctttcgtatatcccccgatcctaggaaacttctaggttatgtgaggtgtactgtgccaggtatattgcggaccatgcgactttctcgacgccgatcatcctcaagcttcgacaaagggtttcgggtatcactcggtgtgccacgacgaagaagtggattatttttcagagcagaggagtagatggaaattaaagtgagagagaagtgaagtgcgctcgccaggtccagtcggtgctatcgttggggaccttagctgaatcccagcaatctcgtctccgaatgatcagagttgacggtcatgtctaagaaacattagctcaatatgaccggtagctatgtattgatccgactgaaaaacttacatttagatgtgcttcctcggtgtaagtccaggttgccaaccaccgtgccatggatgcacttaactgggtttgtccgtggtcctcatcaacggagatggaggttgacgaaagaaaggagagttgagagaaagaaagggaaggaaagagggaatgatagtgtggggagggtaattatatatgtcggatgattttctgacaagagattattgaagaggtttgcgttgccatcaaatgtaccaacaccaggtacagtataatcaaattaaaatagcattcaagtagttatacaaccctatatgacagtgtcatatacagttatgcttctcaacgggctgcaggatgcgctaagaccgccacctgcatgtctatattctaccaaagaccttgtttccgtccatggagcactgtttcgctgctctcttcaacagcccggccgggctagctcaatcggtagagcgtaagactcttaatcttaaggctgcgggttcgacccccgcgttcggctattcctaaaaccaaacctgagatttcttttttgctcttttcttttgcactttatgaaagcaagcaccgcggaggtcaagggctgagttccctgtcatcaataatgtaatgctgacacgccaaggattaaccctgaaagagaagcttcccaaagaccggactatatcaagattggaaggcttggtgggtcacacccgcttagtcatattgaatccggggcagccctggacgggataaccatgggaacctcaccctcatgcttcaccttatgatcagcaacaatgggtttgccgcctcttgactcggacattaagttattatcaatcaaaagagacatcagacactcaggcacttcttcgatttatgagatcaatcttggcagcaaccgctatgcaatgaaactggtgggtcatagagtggctctcgctagcattggacttgagcctaatactggtcgcagttccacgatgagaatggagatccaggatttgcagacaacggcagggatttgaatcggtttcgttgtgaatataacgcctataccaacttgctaaatttcgatgtatgcgaaagcgggctcgtcccacgttgctatgggtatatcgatcgcctcgatccatcctcttttcgcccgcacctcgaccatttcttaaccgatgaaatgcatccgagagctatcatactcgagtacttagaaggtgccgaagaattaaactgtgttaactattccgaagagcgtctgcaattggccattcaagggatgaaggaaatccatcgcgctctcatcaatcaccatgatgtttatccgaaaaatatccttattgtacctagtcgaccggagcgagtggtgtggatagattttgatgttgcaatgtcctttaagacacaagattcgatgggacggaaaggacagttggaatgcgagcatgaagccaagctgcttgctagctttggagaaatactggtaagtcttcccctcgttcaacattgtgcccctataattatagaagactgatatacgttaccagcgcgaggatcaaaagcagggtttgcctccgaatacaaaattttattagactaggatttgcataccatcgtggccatgtctccctaggtgcaatcttataatttgtgcacctcgtaaatgaataaatgtggaggcccacagccaggactatatagagtgagtatatacttctctggattatcccgtcgacaccgacagttactttgtgacgtcaatcttggagttaagagggcactaaagtaagttccgtgtcatcagtatcaatcccaaaaagcttcccattgaacagtgatactagacaaaagacatatatatcgcaattatatctttctctttttatcgttctttcacactcagtcaaacaacaatctcaattccaccatgagctccgttcaaaaagttgatttcctcagcagaggaatcaagctcgttggcgatgtgttcctccctcctgggtactcctccaataccaagtacccggcggtcataatcgcccatcctatgactggagtgagagagcaagccccgcatgtttattcgaaagtcctgacacctgccgggttcatctgccttacatttgacgccgcctaccaaggcgaaagcgagggccagccaaggtatctcgaagacccagcccaacgagccgaggatgtcagggccggtgttacctatctttctctgcgcaaagacgtcgacccagaacgaattggagctcttggtatctgtgcctcggggtggctatgtgccattcgccgcgcaaaatgaccaacgaataaaggcagttgcaaccgtcagtggcgcctgtactggccgaatgacaagagaaggccttgtggaaggaatgggaggtcccgagatgctgcagcagtcgatcaaggctgcaaacgaggctcgactcaccgaagcgaaaggtcaacaggatccagttagccctgcctttcctccaactgttcaagatgtccccccggaatacccacccattgtcaaagaattggcagaatagtacaaaacaccgcgaggtcagcatgaatgtgcacctggtctgtttgcaactagaagtgcggatcttttggcgaacttcgacgcctatgctttcaactacctgatttcgcctcgtcctctttttatgatttctggcgctgacgctagcacgaagtactacagcgaggatgctatgacgagcgctccttgttcaaaaagcttcggtcgacggtaggcccaatactgaatttcttgtatactcgctctttgagttcagaggaaactccgctggtgagcatggctggaactgcaccttccactgcatcgctcgcgatatatgctgccaaagctgacgagataatcagattacgcatgggcttgtgaatgagcgaatggacgtactgcgaaaatgacaccgcaagcatctttgactcgatagtcactagctccctcataatggaaagctttttgtccggactcagctgatcccaggcgactccaagctgtgtaccagatgcttcttccataatgatgtattccgagccaacggcgttatttgatgtggcactccaatcaaagattcggggcccgggaatttgaaggacatctcgagtctaggttaagcatgaatagccgccgtgcgattaaggttcgaggtaaacttacaagctccgtggtagcgacctcggacgcggtggaatagaacgctgggccggcatttgggtttggtatacgagcaagcactattttcccatcattcatgatcaaacggaaagactttgttatatcctcccccagccaatttcgtcatggagatacagctgtctgattgaacggctttggagctcagtaacgttgaaggccttatacctgtccttaagctgctgttcttcaccccagagccattgtctactcgtataacgaaggaagtcttcgtaatcaggatttggtgttgtcatttgctcggagagattcgtgactgtgcgaacgacgcgaaacggaggaagggtagtggtcgttgattgtaaccgtgatggtcctgaaatgagggacgtccgtggttgaaaccaatgtactgaacagtttctcaactttggaaaggctgaaagtgcacgacgacgtcctgtgtcaatgttcatcgctacagtacgtaatgtctggttgggaacggttcaaacatcatctgcgtcgggcgccggaggacgtgtttcgctcaccaggtcaccggtattgattatacctatattgtataccctgctggtaaataccagtactgtgtgacctggtaacctggtaaacccccattcggaggaggtggccgcccgagtttctttacttattagagtcacataactaactaatacctaggcattctataaacttggatgatctagttcccaatatcaaagataacaaatgaaacacctgtaataatgatgggatcggtccccttagtacatcacatatttgatgttggacattacggtgacgcgctttcaagataggccctaggaataacctcaatttccgccagggggtggacctttatttaacccccgaaacatcttgatagaatcatcttacgctttttttttggtttgttacagtgctggcattgtagcatgtcagaccaggccttgtcttctttcatctttcattttcattgctttgctcctttgttccttattcacacgaagctactaactataacctatataaatcgcttcatggtagtcatagtaggtagtagttatttctgtcgttggcatatgaattgaccccaggacttgtcatacctctttgcttactctccaacacggactgctacgtggatcatctctcgactaaacgatataattgctacgcttcgctccgaaatcaccttgggatttcttcctcatatcaactcctttccacgcgatctagttcgcatcctactgcggcaccgtttcaataccaattcctctataatattcaccatggcaggatttcgaggctttagtaaagctgtgaagaaatatacacttctttctctatggatgtgtgggcaagtggtatactttgtgatatatgtttgcgccatggtggtgattgtttgctctgttgtggctttgtgtgttccattgtccattgttttgtcataggttcacgactcctgcgcgaccttctagtcaaattgaattatccaacatggacgtatacaagttgacatctagaatacctattaattcatccccgaagtagatgtatagcaaagccattgattgtacggagtatatatcctagaaagacccaacgcccgatgctatgcacatatcatcgtaaaacaaagtgctcgaactccaaaacattagaaatatagaaaagtggaaacgagagtagacgtgtgggaccaaaaagaagtaagggaaatatatgtgcaggtagcgcgtgtaaacgaaaacaaaatattacaatcccaacaattaaaactcaagtcaagaacttgcctgcggatgccccgtgtaaacaccttcaaaatcaagaccagcgagcatgccattaacgcgatcgatctcacggctcaagtcctcgacgttcatcgctaggctgcttacttcatcgaatttacgccgccggttggcatcggcgatcatttcagacacgaagaacttctgctcttctagcacaatcagccggtctcgaagagacttctcttcggcttccaaggccgagacggcactgctcgtgtcgctggatagactgctattgctaccgctagcggcaatgctgttgtacttaatggacgaaagagcagattctggtggccggagacctgtcgtggagccattaaccggagtactgggtgagcttgtccggctgggtattctctctgacgcgggggttgtatgcttgaggattttcgggagggatttcaaaggtaacatgtgaagatgaaggaagttgctggcttgctgatatatagcctgctgcagcttttgttgcgtgggggaattggtcggcatatcacggatacgtcgagccgcaacattatactgtgcaaaagaatcaatcagtcgcttgcgcaccttggatgcatctgcaatctgagctgacgatggaggtcgtctaggatccctggtacaatttcgttagtaagtgactagaataccagaacagaaaaacatactgtaaagctgtcaacagcttttggaatctaggtagatgaaggcggatgcctctctcaaactgggtcaagttttcatacgccctgatctccgatggctttcgcgtcatgtccgctttgaagtcgcgtcgatcaaacagtgtcgatttgcagtccttgcacagtcttacatcaatattgacaaggttatcgccattggttttctcagaggtggctgtcgggcctattagaacttagatcaaagccacaagtgagggtcgtctcgggacttaccaggagaaatgctcagcccaacctcactagagcatccggtactcggatcaccgcagacaattcgcccgcaagttctgcagtggtgtctgcgaaaagtatagcccgaaaattcctgttggcaaaatggacaacgtgaaacactggcatcatcctgccagctgacaatcgtttgctctatttccttacgccgatcattctgccatgcaagagaccaaagctttgttgcactggggtgtatttgatctggtggcagactagccaacagctgagtgagacgggtcagtcgtttttcgagtcgggagatttccaaaaactccttatcgacggtctgttttcttattgacttgaatgcatccgttcggtccctcacgattcctgttgcctgtttagcttggttcagaattgaaagcaatgtactcaccattatgatcattgtagccctctcttgacttgtagcaggtttcgcatactcgggcccatattcctcgtacaggttcatgatgtgccgcccgcgagagcttcatttggtacatcgtgtgttcttcgcaaaacagtttcccgcaactccgacagttcacgcaaccgttggtggcgttcaatcgtttcccacatgatggttcaagacactcatcgtaaatacaacttgtctgccagtggtctttggttatgagatcctcggggtctagtagtttcggaggttcagggatgcccgcatgggctgctagtgggcggatagggagaggcgcgccctggttctcgtttgactcgaacacatccaggcctttcaacttctggtttaagactgcgagaggctggaacttccttgccttttccatttgaactttgaaccagtcctttacttcatcttggtggctctcttccaggttctgatggatgtcgtcgagatgtctgcggcaaatcgttaatcatagttaaagcgtcacaaggggaaacaatagatcgatacctattcagctgcagcaaagtcatctaaatagaagttagtatcatcccattacatatttacaacaaagagcgcatgggaacaagcataccatctgttcgctgcagatcggacaggagagctgagcccccggagcagccggggcggcagatatcgaagtgtcgccattctctattgaaatgcgggaagtgaggtcttgagtttcggtcgagagctgtgatgcggattgtgagtttagggaaacgctgctggcggtcggcgagagcacccgtggcttgggctgcggggacggagctgatgtgagagcgcttgggttgcccagaacacgacctccacccagcgtcctccgcgacatgatcatgggggcatgagaagctggaatagaagctgtttcagcacaacatccgttggctgtacagaacaaagttggagttgaccggagggaaatgccaattatgtggagccagccttgcatgtggctactggggccgcctgaggcatcgacgccaagagccccaaatgagatttgatattcgttacgttcatagatatgaaggagaggtgtatattgttatggatttcatttagtttagacctattatatgaaatgaaagcattgtatatccctttttaatgtccacaccaaagccaaggtcatctagtagtctatttcctcttttagcagtatactccgtacatccgtggcgcgtcatacaacatacaactacaaaagataggaaagttttttgagatatacccaatttattttatttgcattctgtctgatttgaattgaagccataccttcgccaacaatgaaaccagactagttgagccgagcagtaacgacagacaggaacaacaagactgtaacgacagacggaaacaacagctatagagtcgctaaaacggacaacaaatcaggctttttttgtttttttaaccttttcatctttttttcctgttttcgcgttttgcttcagttcatacaggttcgtggtctcatgccgtcttatatatacaagcctgggtccaaacccaacgcgaattcttcaaatattgagcccttttaccgctcatagtcacggtggtagctggtaccagtgttggggttgtcgtattccttgtggacacgagaggatccgtcgtcaaatcggtcaacgtcgcggtgtcgataggtgccactatcgttcactcgctcgcggtggtggcgccggccagtaggggtgtcgtaatcaaggtgttggtcgtaggcaccggtctgggggtcgtaagttgtggtgccgcggccggtgttggtatcgtaagttgtggcagtcgcatttgtaccgtagccaactgcgccatagtcgcttgtgccatagtcccgtgtgccgtagtcccttgtgtcgtaggtatcgtatcccacggggctgtaggttgaactcagggtatcataggttgagcctgcaggattgtaggctgttcccgcggtgtcgtaggtgtcgtaggtcgtggaccaggtgtctccgtagttggtcatcttgacgatgtgttaagagtgataatattatttgtgtaatctttctttttatggaatgtaaaaagcaccaggtcagtctgattcttataccctcgtcgtggcgctagatcccaggacgatgatactgccctgacatcactcaggcgaccatggacaagtgaggcaatgcggctgaatggacaaagaagataactccaagtcgcatatctctggaaaaggttctgattgatcgagtttgctgcggctttggttccagactgttgcctcagaaggcggatgatgatggtggtatacttctataccccataggattgacagatgattattgaaccccacaagtgccagatatttaggagtttctgtagatttccaatatgataccatgaattggctcgagagagttctgtttatttcgttctaccaagatcgtattcgttgatcgagaccgcgagcagaccttggggttggctcaacacattaggtggagttcgaggatgaagtcgtgccctcaaatagacataattatgggtgagatttggatgtctagcaaagaacaaaatcgctaaggcaagtcaatagcaggaaagaacaccattagacatcatagacatatcagagcacttcaattatactatgttttaggtgtacagccatccggttggctctatgctgatgtcgactcccacctagtcacaattacaattagctatcccgaccgagaggcaccaatgaatccgacaggaattcagtagcgttcatcaggtctgtgcttccataaacaactctccggcggtttccaggtgctgcacgttgagctggcgcaccctcggcacccggttggccatttgttcggcgaacccattcctgcaagttgccgtactcctccatgcttccaccaccaactgtaaagacaatagcctcgctgaaagcttggcggcgctgtccgaagctggcaccggtgccagggcctgcgctaccaatgccaccaggcatttgcgggtttcgcgatgcggatgccggaggcatggcgccacgtgcgttcgcgctcctcgggtcaaagtagaggtagttttcggtctttgcaatggcagagcttgaagctgcagccgggtccatgatggactcggtaatcttggtcacagtgagatccttgttcgctggtaggaaattctttactcctgaaatgagcgagtcgaagttggcacctaaagcgcccgaggtaatgcgatccgtcaggcgatttgaaagtgaggagaacccacggaatagatcggacgattgttgttctggtgcagatgttgtcatcatggtcatacgcgtgatctcgcgcacttggcggacataggcaagagaggagatgtcgggcacgccggctcgtgtcagggcctcttcgaactgagtcatttccgagcggctgagctcagtttcagtgctgaggaaccaaatcacgaacaagcgcagcttgtccaatggttcacttcctttggaaggatcactgattaactccaaaatctgtgactttgattgtttggtgatggtctcttctagttcgaagaagttgtccaactgccgatctttgatacccttgagcagtgcggtggcaatgttcatgtgcatatcaagaactgccttgcgttcccgcaactcagggagcagtgtgatggcggccttgagatgttgcgcggaggcactggtatcattctggagatcttcaatcgaagaggctcccgtcttctttgtaatctcattcgcatcttccttgtaccgcgtaagctcagcatcaatatcctcagccacttgggggaatggggctccggcattgcgttgccagaagaagtcggtactgttcaagtcataagaccttttggagcccttagcttctggatcgcctgcacctgcatccacagtgattcgattcaaacgcatttcaagaacatcctggactagggattgatatgtccacgagtgagagagcattgggactagatcaatgtttcgatccatgatgattagtaccggccgtgctgatggcactcctggcaaagcgttttgattgcccgagaagaggttatctttggaattgaggatgtggtctcgcagtttccgatccagttttgttgcgatcaattccgctgcaccacccttggggcaccgtatgattgggatactacctgcgcagccagtcagaacttcgttcgatgatccaagataggatatgatacttacccattgtcacgctcacactaaacaagccactaaccactttgtcaacaatcccatctaggtcttcatcagtcgtttttgggctgttgatcttgtagtatgcatcctttccaagccctaaactgaagaggtccggttctgccacaataaagttgagatattgatcgaaaacctgcgcaatatgctcagatgcgccagaagtgactatttgagaagcgaaatcctcgagaagtggccgcgggacggaggataggaagttcacgtaggctggggagtagagcccgtgggaaaggtcgcgagtgatcgcctggatattatcgggggttggttccacgaaatatacaaccgggacatctggaatagggtatctttgtgaatgaaggtttcttggagtcttcgttagcgttggcccagtttagggggagaaggcggcgaccatacagatgaatagttatgccccatgcccggaggtcatttaccctcaggacactgctgatgacatcccggcccatattatcgaagaccaagaccttccatatcgggtcaccatcttcattcaaaatcggagtggagtgtgagataagaccgccggacccggactgatcgatggtgttgtcttcaacaggttgtggatcatgattcaagttcaataacttttgaattgatgctgaaagccagggatcagtaaaggtcaattcatttcaaaaatctagcttgcgtcacttaccgacctgtcggtcccggagggacatggattgcgccatggcaatagttggcagcgctgtgtgagattgggagaaatgctcggtttcaaccaaagcttggaaaggtacagagctgcgcaggaagatagctgaaatatgcgcgcaactcttataataatgatgaggttgtaccttgcactgttgacaccggggttcttgctatcgctccacctggcatggatcccgctctgagctgcgctgacataaatattgcaaacactgcaaacactgcaaacattaaagatcatatgtgtttaattctgccatgtaacacaggggttgtaacttacacggcggtgggccaatgaacgaccttcaataccacaattacggtcaattttggtacgccatcgtaccatcggttaaccgccttgccagcagcttttgtcccttttactctcttcttcaaaccaagtcatctactctaaccatccgtcaacacctttcccccaatcccttcttttttttccgtaaagcgaatggctgtgacgctagattggcccttcgtatgagagccttttacttctctgattcctcaaggacactcttttgggacaaaacttaagaccgagaaaggagagcgaaaagccggacaacaggaacggcccaagaagagaaagcaggagatacaaagtcaagaacacaaggagagaggcgccggagaaaaagctgggccatcttaatacttctacgttgtatttgcaactgcggagccttcgtcattaagctgcaaggccaaaggtaacgccgtcagctcgcggaacaaagtttgtgcctgaggcatacaccgctttaatcctgagtcaaaaccaaaagcaatcgttgttttctctcataaggtacgacagtactcatactgcaactcttgaagtccactctaggcgtatcaaacatgtgaattgtctaatccttatcaattcttcagtccagcagctctacaggcccctgttctgccgtcgtgagacaaccagccaatcatctcacttccctcaccggaaaaattatttatccctccgaacctccgacccacttcatccaaaattaaaaggcggtgagcgccaaaataaactccaagccctgtccaggcaggtgcatgcacgtgattacgtgaggcttcatagtaacttagagaagcttcgactgagcttcaccatggagcaatcagctcaaacccctattcaggggttatctcatgggaattcactacctgctgattactggagcacacttgaccccgcctaccctgatcccgagcagcagcttcagcagccatctcaaccccagcaccagcctcaacagcagcacgattctgcatcgcaaccaacacctcttgggatcggatgggaccatcctgtttttcaacagcagccaagagagctagcctcacgaccagatccgaaccatggcatttactcatcagtgcatcagccttggcagcaagcaaatcctttgcaacagccaccgcaacgaggatatggagcttcgcatcagtatcagatacattcccaagctcctcatttccaacaagatgggttatcttttgactctcgtcccctgagcgcctccgaatcttcgtcatttccatcatttccctaccagcaaaattatttccatccacaaaacacacacatctcagtgccagacacatttcctgaagcacccgcgcagcagagaatacagccacggcaacagcaacaaccccagtcgtcaatttctgcatactctttacctcaaagctactcctcggaaatgctggtaagccgaccctaaatgcccttcgtggtgaccgtgactctaacttgaggcagcaaaacacaattgatttgaccaacgattactccgattcagacccgaatgtcaccatcaacccccagttcctaaattctatcccgcaggcattcaatccacagcagtcttcgttgacaaacaactttattcagggaattcctgcagacctcaaacaacaagggagcgaacagtaagttatcactttactttatggatgtttaaaatgcacttgctgatttttagaaggggtaggcaatttaattactaccagcatgatctttcagtccagtcgcatatggcactaaatggcaacccggtgattccacctggaggtatgtgtagaccagttgaaacccattgtgttagacttaatactgactttcataggattaccagtactgcaagttgtagtccccgataagaagggcgcttctaataagcagcaaacgaagaagacttctcaaaatggccgaatgagaactttatctaagtcagaaagtgaaagttcggatgaatccgatcttgagattgaagcacctgacgagccttctcctatccctccgatccgcccgactgagcccgaggctgcagcgcaatatgataccctccaagccgtgtggtcaccgaggaacaaatggcctggtcctgagaaggtcaagaatgcgctggtagcctacaaagagcttgtcaaaggattaagagatgcgtggaaggaacaagttcaggccatgaagctggctgaaaaccaagatgacaaccagaaagcaacacaacttaaggagaaagtcacttcgcaacgtcgtaccatggataaaattgcgaccacgacactggaaatgggtcatcccaatattgttgagaagtatgtatccctctcctctcccaacccctacatcttccctcccttccatctggctgtaatggccacagaaatcccgaagctgtttgagaaacctataaatattcttggaagcattggatatgaaagcactgtcacgggctagaataaaggctcatcgctctattcgccggtggcaaggcttgattatacatgcgtgtcctaagtacatatataagagtatcagatggagcaaaatggttccatcatatggattctcagatatgcccttcagaagctatctgtgaatctctttggggggaatctctcctatctagaaattggctcaaacttgcagctttgtgtgccaaaattcttgaaacgttatagttgagctcaaatgactgatcgttaatttcatgtaggctgggagagcatcctatggttgtggcggctttatattcgttcttactcgatcgtttccaagcagcagactttgctgggactctgactattaatttgctttcggtaagtttaacgtttgtctcctcttgtgtcaaatgcaatggctaacatggaataagctcttctcgcgtttctcgactttgacagaagacctgatgcaaaagaccaatctttccaaattgttgccaaagtttctcaaaaagggtggccagcaggttaaggacctcacacagaagatattggataatgctgcggcctctacgaagcgtaaacacgagagtgaaaagtccgccaaggaagactctcatccaaggagcgttttagcagatcagcctaaaggagaggctggagtgaagcgaccccgtgaggcggatagcaatctgcagcctggcacaaaacgaatggcagttaccaatcccttgaaggatgtgaataaacatgcacccgcaagcaatggaccggtcaaaggagcacaaagtagtaagccaaccggcgctgcagtgctgcgccctaaagccaatatcgtggcccctaagccaacaagtctctttggcactttaagttcggcgtccaagagacccgggaccacaaatgcggatagggctgctgccgccgccgcagcaaagccaacgtatgtacccacgaaggaactgtttccgaagttcatctgtactaacctttcaaatagtgctgcttccgaaaaggaaaagacaccagccccaaagccatctttctcatttggcgacattatggccgacttgaacaaacccaagcaggcaccaagccccaagcccgccgaagatcagcccccggagactgaagctgagcgcaaaaacaggttgcgtaaagaagagcgccgtaaacttcgcgtgacctggaagccggatgatgctcttaccgaagtccgactatttacccacgacccggatgaagaattaggtcccggcgatgggtcattgcgctcacgaggagacgttaaaggtgaaggtagtgttctcaagcttcacaaagatatggacgaattggaagaagaggatctcggtgagaccgtatttcaagacggttatactctttcaagtaagttattcttccaaatgcatcttaaattcttactgaccattatagtggtcgatttcgatttcgaggaatcaaatgatggcagtttcatcaagcgcggcggcactcagctgcccacgagtcccgagagggaggctcaggagcatcgggaatctactacccttatggtcttctatacctctcctgctgacatgcccgacacaccaaaggaaccaccagctcctgaccccgacgatattgttaccgatgtattgcctttcggagagttgcccgacctggtcaaggtatgctatacttctgataacactacgatccaatacttacaaagacactacaggtccgccaggaacgttactactcctacatgaatcccaagcctacgactccccaaccaacccaacaaccgcagcgacctactcccggagacagtggatttgacatctccaatttgctcaagatcatccagggtgttcctggacaggcgcaaccaatcccagccccgcaggcaactcaacccgggggcatgccggatctcgagaggaccatcagcatgttccgtcaacaacaacctcaaccacaggtccccccggctccaccagtaccaattccacagccgcaaggccttgacttcaacgcgatattgaatgttatgaaacaaatgcaggcgccgcctgcatattcccagccccagcaatcgcaatcagcaatggcacctaacctgggcgccatgttcgcacaattcggtgggcagaaccaaaacggtgctctcccattccgacagcaagggcatgactatgaagacccagagcgcaagcgcggccgcgagggcggttattatgacgacaattctaaccccgaatcgtggagccgctcgaaacgaaccaaatttggcgccaacgaggccaagcctgtaggtacactgcagcatttttttgataagcagttggctaattcttttgaaatagtataaggtgggactagttgcttgcagattttgggccgagggcaagtgtcgcaaaggcgacaactgcactttccgccacgatcctctctaaatcaacacatccttttcgactgatacccttgtactgccgttctctacattggcacaatctttttttctcatatctatgcattactacgttccttcatggtttctttactattttttactgggtcatggaaatgtattttacaactagaattctctggttggcgttcatcgcacggttgcgttccaattcatggtctgggatgtcagcacatattgattcgtcctctgattttcaaaatcctttgcatgcccccccccacaagctcaggcgttctctttttttttctttccacttgtttcgcctttgtttctcgcttcgcggatgcatttagcgagggggtccccagatctgggggctgatattatggcgcatggatggagggcgatgacgaacatgtacaattaggtaattttatttttttcttcacaggcaagaaccatcttcggcgcaatgtcttccatctctagaatggtccgcttggacatattccgaccgtaaaggtggcgttcctaggagggagcgaccccgaaccgtgggcgtttccccatattccctcactggtcgaaggcaactgcttttcctctgcaccacactattggcatttcttcgtgccttcctcgttcagaaggcactggatcggaaatgcttcggagggattcgcaatatcgaagtttttcactgaagatcttaaaacacttgatacaccaggtgtttttcaactggattctccgggaacgaattgtgggcgacatacttcagatccacggaggttatcaatatgtgggaaaggagaaaggatacctagggtctatatgcctcaggaaacaaagaaaatgcatagccacgcttgcaaagggaaggtaaagtacggagtacttggaaccaaatttttgctttctatatcgtgaaatactgccgatatctccccgattctttgttttatccttacacacggacgaggacatccttttgggaaggacgggaccaatatatggacgatgtgcttcgggcggttgagctcggtgctacgttcaactttggccaactggcacaggcaccggcctgtctgtccagtctaacccgcatgaagggccatgaccgcagttttcgactccgtttcgtagaacaactgctcgatattgccggtaccgcgaggcacctggactggacatatgcctgctctacttggccgtatacaggatgtgaatgcgttggtgtgtaccctgcattaccttgcccaggttatgagtgcgacggacgttacagacccttcagtggttgatatcggagtatgtattcggctctgaagcaatttgttgagagtgaagagatccgactatcttggagaaggtcaacgtgcctgatagtgtggaccggcagttgctttgaccacagcctcgctttgatgtatagttgacaacgatttagcaattctaccgaattttactattttacctttcaactttcaactttatagtacacgttggatcaaatcggacggtttgcggtctctatgatccaaggttgacgatgtaaggatatctagttggtttgtgatttttgagacattatatacaacatatcatcttttttggctatcttaacatgcctccggcgtccttaggccaaggcaaagaaaatattccgatggcttcagtccgcagacaagaaggagaactctttctgaggtggcgtgcggttgaccgcccttctcttcgcctcactatcgagggcacgaatttagaagctgaggttgttcagccatcctcaataattgtccatagttcactagcatcgtctatatgtcttgcattgtgataaacccgaatccattcgcttgatcagccaagatccaccagtatgaccgcaaatccagatgccaactttgctatatgcaaccaccttatcattgtctgctgccatgctatttacaccggaggcccaaagcttggggcctcagagagcgagtggttagtgtgaaatgatcttttatatgaaagataccatctaatgcactgaaggcttattgagcccttccagaagggagaaacacccacattcatcgatcatgtcaaagctggattgaaagctctagcagaagactctcatggcttgcttctattttccgggtaagggtttctcatcatatgcttttcaatttcttttcgttaatccattgcacagagggcctaccaagaagcctagaacagagctcagtgaaggtcaatcctacctggtaagaagcctgaattccgtacaaccgatcatccagaaagctcatatatagcaacattcagaacttggccaaggataacgattacttccgagacatgtccactatctccacaattgacccatcaagaatcatcgcagaaaccaacgccacggattcatatcaaaatcttttgttctctctaatacagttccggatacacacgggcatttatccacagagagtcacagtcgtgactcacgagtttaaacgcgctcgattcatgcagtgccacttcccagctgtgggactgattcctgttggcccggaacaaaaagactatatgcacaaagttgctgtgataggtatcaatccaccagtggaagttactccactagagactttaactcggggcgaggctatgaatgggatcgggctttggagagaagatctttacggagtgaacggggatctagtagggaaaagggcgagacgaggctggtcccctggaatagaaaacgatatattctctcatctgggactggaaaatgtggtgtcacatctaatccgctatgatgggcatgaccattgtaataattggttcccgaagcgagagagcctgccttggtcttatactaaacatgatacaaccaaggggccttgatgttgaccgaaacaaatatgcctctgacatagataagtggaaaaagtccttgatcctttcccgaaacgccaatccgtagtatccttcgtatttgatcataatgtgtacccgggagcttaatccgccagccggtagctgaccagagttccaactcggtgattgtttgtgctgaagctccttagttgaaccttctctgcgttcttaatttccttggcatcactgtcgccccattccaccggcacgtctgaatctgcgtcggcatagacaagtacattgaaggtgcagtcaccatcaaggacggggagaaaggtgacagatgcggtgatttggcggaagatggcttggatctcctcctgaatttgtttttctgtcttttcgataggttcgggggtttttgcgtctcttcaaagcgtaaagatgttagattagtgggatgatcaagatgacctcacggtcgacggacttaccccgatgtgctgttctctttgtcaccggctttctgtgagctcttgcttttcgaatttttgccgaagacttcgacctattccgtcacattatagttagccacgggcttggataagagagtgttgaatgcatacgtcgaattgccatctctccacatgttcgccggtctccttgctcgtgataactaccacaagcttcgagatctttcctccctgcatccattccttcaactgggacatgatcttcttgatgtaggctttgacctggtcgtcggccgaaactgctatgaagttagggctgtcgacgtcggctaagaagaacacggttcacgaaccgagcatattgaggccatattttttaatactattttcaattagcttgctgtattgtagtgggtaaagatggagggcatacttacgtcgtgaaatcctcgggaggatagactcctcgttggaagctgagcacccaatgcgatcagccagtgtcttggactgaaaacgtctgtaaacttacaggattgaattaatcgagtattcaaactgagcctgttagtactcagacatcattgacgtaatctaaaggacgactcacgaattcggagacaagcttggccgatcctgttatcttgtaagctttgtacaaccacgataactgcataagtagacgagaggtatggacctttgatcgacagcttgtgcacctttgactttcccttggtttccgacatgatgaactcgtagataggcagctgcggactctgaaggtgaaagaaagatagagccttgtttacgtcgaatggtcaccgcagcaataaacagtcaccgcccgcgcgtccgttttttctccgcaaatcgtgacaagtccaaccagcactcaagtgctgatcgattgccccacggataaacttcgattcgacgcttgcataccatcagcccctcctatgccaccgcagaagtcccaatgcgaggatgtctgcagttaggccgatggctgagcgcagcgccgagatgccaggccgcgagcctccgaccaccaactgtattttctttgtataggtttaaaaggagtttctctactaccacgatttactatggacgttcgaaaattgcgcatataaaactcgacgtaaacctcgagaagagaattgccgcgatcccaatcgaacgttttcgcaatttctgcatcgttgcacacgttgaccacggcaagagcacgctttccgaccgattactcgaattgacgggcacaattgaagcaggatcgaacaagcaagttttggacaaactcgatgtcgaacgagagcgaggaattacggtcaaagcacagacgtgtaccatgatctacaactataaaggcgaggattacttgctacatttggtcgatacacctggccatgtggacttccgtgccgaggtgtcgcgaagttatgccagttgcggtggagcaatcctcctcgttgacgccagtcagggcgttcaggcgcagacagtcgccaatttctacttggcctttgcgcaaggcctcgaattgattcccattctcaacaaggttgatctcccctcggcggacccagagcgggctctggagcagataagaaacacattcgagattgatacagaaaatgcggtgatggtttcggcaaagactggattaaacgttccggctgtgctaccgacggtagtggagaagatccctgcgtaggtttacccagtggcttcccaaagcgctatttattttgctaacttcatgctagacctatcggtgattctaagaaaccacttcgtatgctcctcgtggattcctggtacgactcctacaagggcgtgatcctcttggtccgtattttcgacggtgaggtgcgtgcaggtcagcagctcatctcctttgttaccggtctcaaatattttgttggtgaagtcgggatcatgtatccgaccgagaccgcacaaactgttctccgtgcaggccaggttgggtacatctacttcaaccccggcatgaagcggagtaaggaggccaagattggtgatactttcacaagagtcggttatgaaaagatcgtcgaacctttgcctggattcgaagagcccaaatcgatggtctttgtggccgtatacccagtgaatgcggatctcttcgagcacctagaggacagcatcaaccagctggttttgaatgatcgaagcatcacagtacagaaagagtcttcagaggccttaggtgccggtttccgtatgggatttttgggaacccttcactgctccgtgtttgaagaccgcctacgacaggagcacggcgccagtatcatcattacaccaccctccgtcccagtcaaggtcgtgtggaaaagtggcgccgaagagattatcaccaatcccgccaaattccccgatgatgatagtgtacgactcaaagtcgccgaggttcaagagccgtatgttttgtgcactctgacgttcccagaagagtacttggggaaagtgattgagctctgcgaagccaatcgcggtgagcaacaaagcattgagtatttcacatcgactcaggtcattatgaagtacgaagtgcctctagcccatttggttgatgatttctttggaaaactgaaaggaggtaccaagggctatgccagcctggactacgaagaatctgcatggcgagctggtgacattgtcaggctacaactcttggtcaacagggagccagtggacgccgtaacgcgaattatgcattcgagccaggtgaaccgacagggcagaatttgggtaaccaagttcaaggagcatgtcgaccgacaactttttgagatcatcatccaggctgctgtcggtaagaaaatcatcgctcgtgagactatcaagccttaccgaaaagacgtgctggcaaaattgcatgctagtgatgtaagtcggcgacgaaagctgctcgagaagcagaaagaaggccgcaagaggttgcgagcagttggaaatgtcgtgatcgagcacaaagctttccaggcattcttggcaaaataagcgtgtaaattagcatctaaatacattgtataacactatttctgagatattttctcttgtattaagacattatacaaacatgcgccactcatgacagcggtgagagctttaccggcagaaaaaaagttcatgtcaagacccccgccatataacttcttcctctactcattctcacttcactttattgtgtcaaaataacctcgctcgatatctgtggcttctaattgcatacataccacaaaatatcagagttaattcttcttcgagcctgaaatctggtctggcggctgacgtccgcatatgccgatcgcatcgctttgagtcaccctgccatgctccgcacttgacacggccatgcagcctccagagggtgcgcaggtagacctgggcaaggcccaggttattgacagcgttcctaaagtgatcaaggaactgaagtttggtgtcttgtacgcagttcattcacatgtgcttgtcacaagcgtttgtcgcagacttgatcgctaatgaatatttatgttccagaaccaatgatgatattgttgcccaagcagtggtggaagtttccgaccgaaagtttttcgacttggatcagacccgaacggtcgttgcgaatggacctctcgaccagcgcatgggtatctcgaacaaaaccgattcttgcgcaacatgtggaaacaacctcaaagactgcaatggtcattttggccatgtgagattggtcctgccatctttccacgtcggttatttcaagcgcgtcatttcgatccttcaggaaatttgcaaggaatgttcgaatattctgctccccgaggcagagcgccgtacctatcttcgcgatatgcgccgaccgggccttgataatctacgccggacgcagatagcaaagcgcatcaacgaacggtgtcggaaaacccgtaaatgtacatactgcggagcgatcaatggtgtcgtgaaaaagaccggaacaagtgctctgaagattacccacgacaagttccgtgcattcaacgtctcggtttccgtcaaaaaagaaacgccgatcagcaaggatgtctttgataactctttcctcgaggcgagaggcgcaaacccggaggtcgaaaagcacttcaaaaaggcgcaggatgatatgaacccccttcgcgttcttaagctattcaagaaaatgtccgactctgactgtgagttgattggcatgaatccaaaggaggctcgcccggaaatgttcctatggcaatttatcccagctccaccggtttgcattcggccttcagtaggacaagatggcgcatccacagaagatgacttgaccgccaagctaggtgacattgtgcagagcaatatcaatcttaaaaatgctctactcaagggcgctccagttcaaacaatcatggagtgctgggactacatgcagcttcaaattgctgtctacataaacagcgatgtgcctgggcttaacaaagccgatcttggaaaaccaatccggggcttcgttcaacgcttgaagggaaagcaaggtcgtttccgtggaaacctgtcaggaaaacgtgttgatttctctgggcgaactgtcatttcacccgatccaaatttgcgagtcgatgaggtcgctgttccggagctggtggcaaaggttatgacttatcctgaactagtgaccagatataacaaggaaaaactgcaacgacggatttgcaatggtagcaacaaatggcccggagcgaacttgatcgtcaagaaaggaaccggattcagacagatgttgaagtatagtaatactcagcgaatggctgatcagctgcaagaaggcgatgtggttgagcgtcatctcgaagacggcgacattgtgctgttcaatcgacagccttccctccacaagctcagtattctatctcatttcgccaaaatccgaccccataggactttccgattgaacgagtgtgtctgcaatccttataatgccgatttcgatggagatgagatgaaccttcatgtgccgcagaccgaagaagcccgagcagaagcgatggagctaatgggcgtgaagaacaatttggtcacccctaaaaatggagagcccatcatttctgccattcaggatttcattagtgccgcgtatgtgttgagcagcaaagacaacttctttgatcgtgcctccttcacgcagatctgtctctatatgctcggacctgaaacaagattcgatctcccaccaccatcaattttgaagccccagatgatgtggactggcaaacaagtctttaacattcttatgcgccccaacctatccgaccccgttatggttaacttagacgccgcatgccgtgagttcaagatgcccaaggatggtcgtcccaaggacttggaccccaatgatggctggttagttatccgcaactcggaagttatgtgtggtgtgatggacaagtctacaattggttctggaaagaaagacaatgttttctacattatgctcagagattatggcccaccggcagcagccgagggtatgaaccgtctatctaaactgtccgcccgatggttcaccaacatcggcttttcaattggtatcggagatgtctaccctagtgcaggactcgttcagtcgaaaaacgatcttgttgaggcagcgtactcgcagtgtgacgaagtcattgctaagtacaaggcgggcactctggagaagtatcctggatgcgacgaattgcaaaccatggagaaccagatctccggtattctcagtaaagtccgtcaacaagctggtgacgagtgtattatgcagttgagcaagtacaactcgcccctgatcatggccacttccgggtcgaagggttctagtatcaacgtgtcccaaatggttgctcttgtcggtcaacaaattatcggtggtcaacgtgtccaggacggcttccaggatcgtaccctaccgcatttcccaaagaatgcacgacagcccccgtcgaagggtttcgttcgaaacagtttcttctccgggctggagcctccagagttcattttccacgctatgtccggtcgtgaaggtctggtcgatacagctgtcaagactgccgagactggttacatgtctcgtcgtctgatgaaatccctcgaggatttgtcatcgatgtatgatgacacggtccgtaactcgtctgctgccatcgttcagttccagtatggtgacgataagttggatcccgtggatatggagggtaaagccaaacctgtccacttcgatcgaacatttattcactcagaatccactacgtacaacaacgacgagcgaagcttgttaccgatggaaatgatggaagtctgcgaacagatgctttcgaaggaacgtacgaagctagtccgcaaggacttgctcggcaatgacctggcatatatggatcgcagtgatcatggtatcgatcagttcgaaagtgcccgtgacttccttgactcgattcaggaatacgtgcaaaagagggccgacaaattgatctctcaaggcggcgatatcgacccgtccgatcagcagagccgtaagggcttggatcacacaggcaagctgacagataccacgttgagggctttcatcactgcctgtttgttgaaatacaagagagcccaggtcgagcccggtcacgctgtgggtgccgttggtgcccagtccattggtgagccaggaacgcaaatgaccttgaaaactttccatttcgctggtgtcgccggaatgagtatcacgcagggtgtacctcgtatcaaggaaatcatcaacgcctcaaaggagatcagtactcccgtcgtggcttgcgaattggtcaacaaagaaagcactatcgctgctcgtattgtgaaaggacgcattgaaaagaccttcctccgcgacgtcatccactctatcacggaggtttggtcccccgatgatgcctatttgaaggttgttctgaactggaaaacaatcgaggatctggcgctggagatcacgacgccacagatcgtcgaggcgattaaaaccaacaagcgcttcaagggaggcgatctcaagttctcgtgcaagcaagcctcaatcaaggtccacatggatctcgatccggccagcaaggcatctctttctaagacggagattgccgccacgagcgttgatcccttcctccgcctgaagcatttgaagcgtattcttcctaacatccaaatcctgggtcacccacgtgccacccgagctatcattcgcacggacgagacctcgaccacgaacactttgctcgtggaaggctacggattgagggagtgtatgactacgatgggtgtggacggtctccacaccaggaccaacaacatcatggaggcgcgagaggttctgggtattgaagctgcccgaagcacaatcgtcgtcgaaattagcgaagtcatgaaggacatggacattgatcctcgccacatgcagcttctggccgacgtgatgacctacaagggtgaagtgctcggtatcacgcgtttcggtctggctaagatgcgtgactcagtccttcagcttgcttcgttcgagaagactgccgatcacctcttcgacgccggtggtctcggtcgtaccgatctcatcgagggtgtgtcggaatgtatcatcatgggcaagacagtgtcactgggtacaggtgctatggaagttgtgcgtaagctaaacttctaccaaggccagattggcccacgaaagacggtatttgaagatgcttggaccgaacattgtgaagcgcctttggtaaggcgacccaagaggaaggtccgatgaagtggctgtgaccctgtgactctgtgacactgtgcattaatttcggcgttaagattttggccttttggacaaggcttgtacatgtacttatctgagcggatgaatttcattgacgatatgatcaatagttttcatttgtcctctttgactctacgtgagatgaactattagggctataagaagccgaatgtggagtactcctatatgaccaccccctccacaatgccccaggttcgaacctatcacaatattaaaaaacaaaagtcggggtgtgtacagacgtgaagctaatttccaatacgactgtagaaatatctagggacaagcttcttgggttatattcaaatattcaacctttttacacaaagtacaagaagttcacaacatccctcaacggaatgtctcggattctcaacctatcggtactccatccccaaatacccaaatatccggggatatcacaacgatttccttgtttttttttcaacggctgcagcaatccgaaaagagaacctctaggaatacgagattcgagacccttgggatcggagaaagggtcggggagccgtttatttggaataaaaagaaggcatcaaatcacccaagagagcacccatgtcccgagtgaccagggagtgcatcgtcctccaatcagcatcgtgaaacccctgaggcagccatgggggttaacctttggccatcacatcgcctcgacagttctttgttacccattgccttatccggccacgccacatccgtcagcactcggtgggttgaatgtttctttgtttgctgtgcagtggacggtctctcgaggaattgctttctaactacggcgtacttcgtactgaatatccgtgggtcgcacttaatctttcgcatctcccctcatctatctccccggcctccccgaaaacccccccgcggattcgcacttgggatgaacatggagtttggcaaccaaagaaccgctaggaagcgcgagatccgaacccgagccccgacggcctgtcagacctgtcggctgcggaagactcgatgtgacaataccaggccgacctgtagctactgcgccgtgcaggggatggagtgcaactatcccgaaacatcgccacatcagaaccagtaagataacatgatcgtgtggagaggacaacacactaaacattagccttgttcttagggttggatttgattcggggaacccatcgaacaatgaggtgctccagcgactgaatcatatcgccggtttgctagagaatatcaaatccgaaggctccaccagctcgactcgctcactcaaggaaggattctttgagttggccatgcagaatactagccccatagctgattcattgccggggagcaatccatctagcaccagcaccgctagtatcgatgaccggggagctgataatgatccccgagtcctttacatggctagctccggggagaatatgctccgatggcctattttcaacaaggtcatcaccgaagccgagaaacatatccgatcttttctactcgactcgctggataaccagccccgcagtatgcaggcaccccggcaggtggggattggaagctttgtcgatgagatcccaagactttgcaggaagtactttctactatgccaccgacgaaacccgatagtcgatctggacagtctagaccgttatgccaaggaggtcaccgtccagggtctgggatgggatggcccctcgtgtcaagtggtatgtcaactctcctttggaagtcccacttgaactaagtcatttctgtagctgttagcgtgtgccttggcttcgtgcacgtcatcgaagtttgttcccctagcggatgatatgccagcgaatctcgatgcacttcaagcaccacccatgtcagacgccaatctcgatttggctgagacatatttccacgcggcaaagcagagattcggcttcctgcacacgtccccaacagacatccagtgttttcttcttgctggaagctaccacagacatgccatacgacctctgcaggcttggttctgttatcagcaggcatcttgcagattagaagttcgtttgcggtcgctgtgtagagagcagtggactgctgatgacaattaccataatctggaatcgagactatattggtcttgtatccaagcggaacagtgggtttttcttaccagactcttatatgatcatcaactaagtatcgtcgacagtgagatgcagagcgagctccctctctggagcagtggtcttgaaagcctgggctattcagatccattccctaaattctctcgcagatcttcttcctcatatgatgaaatggatgaagaccaagattttgcagtcaagccaggctttgagctggatggcaccgaagaagagaaaggctggaaattctacatcgggtccatctgtaaccgccgaaccactaatgacatagtgtctgacatgtggtgtcaaggagagaagggctggaccaaagatattcccggtcttctaagaaagacaatggacgcggagcgtgtagtaacatcatggtacgaccaagtcttcgaatatggcaatgaaaggacccctactggccttgctaactctttcaaaaggtaccaaatctcggtatccgggatccagtcccaaaaagacaatccagatctgaggttcttcttccgtggccggtaccacatggcattagagaggatctaccgaccagcgttctacctcgcgatgcacttccaggggatgccagcgtttatcaggaagaacaacgcaatgtgggcagaagtgttccatctggcccaaaaagccattgacaactgcgtcaccctaataccaagctactggtatcaattccgccacgagtggatctggaatgtagtgcgcgccagcttcgcctgtgctgtgcacatcctcggggctgtcttatatcagcttgaagcatctcgggatcctagtacgtggcaggtacgtttaccgtcgaattggactgctttggtgaggttgtcgattcgaacgctgaagcattggtcgtcggagtctactgatctagaggtcatggcgtcgacccttgagaggatgtatcagggtacttgtcggttggctaatgtgcgcccggatcttcatctgctttaattgttaatatggaagggatattggatattgggaaagggatatacatatagggctttgtgaacgaactcttgcgtccacataattatgagatactatgcattgatgatttcgattatttaattatgaactgcttctgcttcaatcggtttattagcatgtcaacatacattatgtagttattcaatcctcctagttctgtatacaactggttatactccgacatccgccccaccacaactttttcctcttcacttcatccctttccaccttcaacctctccagctctctccaaccctctcgaaatggaagaatacaaacccccagctctcccctcccccttcaacaataccatcccaccaccaatcctcctcacccaaggcgccgaagcccatctctacaaaactacctccctcgacccctccatccccgccgcgctcaagatccgcccatcaaaaccctaccggcacccaatcctagaccgtcgacttacccgccaacggataatttccgaagcgcgatgcctcgcgaaactcatacgggagggcgtgagcgtcccagcactcctagccctggactgggagggacatggcggccccgaaggcgggtggggcggcgcctggctaatgatggagtggattgacggtcctgtggtgcgggtagttctcgagcagtgggaagcatggatgaagcagaacgagggctcgctggatgagtcacagattgaaaacgaagaggcgcgtgtgcgcggcttgctgaggaaaatgggctcggccatcggtgtcctgcacaaggccggtattgtgcacggagacttgaccacgagtaacctcatgctgcgtccatctgcggacgcaggtgatgcggttgagggcactggagcgccctctttggagggggatgtcgtgctgattgattttggtcttgcgtcgcatagcaatcaggatgaggaccgggcggtggatttgtatgttttggagcgggctattgggagcacgcatccgcgctcggagcctttgttcgaggcgctgattacgggttaccgggatagctacaagggggcttcttccgcgctgaagaagcttgaggatgtgcgcttgagagggcggaagaggagcatgcttggttaagcctctcgtttgattttagggatgggatgcaatctccccccaactgctatgatcgatttagaagcaaaaaagaaacgccacgcttgtcacgacagatatctttattgacgaaagaaaaaagcattcatgaccggtctttgagacacgtgccgacatgagccgacgcgaaataccccttgttctcgactactccgcgatccttgatgactgccgtgtatttaaccacccattgtggctcgacatctccctggatgccgtcgttggcctcgggagaggaagccaagattcccgcaccactcttctcggtgggacccagcagttcccgcgtcgtgccgacaggaagaatatcatggcagtcgttatgggtgaggagttgaatgtgctcttgtttcgcatagagaatcaaatgtttaggaacgacacagcaatccttaagattgatctgatcgaccgatggcttgaccttggtgtgcggcaggaaccgggccaagcgttcgctgccgaactcagcaacgcccagctgggcgatcacgccctgctcgtgcagcgactctagcacgtgccatgtctgcaccatactgtcgaagtcgtccggttcaccgttgctcagctcgctgtcttcttcttcgctgtcgtcgtctgcgtcgaacaggatccccgggaatgagacgatcagtagatcgatagacttgacatgtagctccttcaataccagatcaattgcctctctggtgtgtgcgcaccgccttgataccgggatccccggtaggtagaatagtttcactgtgatatcatattggtcacggtcctctgacaggcctggctgtgagaagtcgatctcggggatatagaggccgtcctcggtttgtagcgcccatgaacgtggatgcgacacggattgaccatttgtgtcggtgccgttggccggtgacgtttcggtttgttgcgaggcgaggaagttcgatcgaagcgagttgattagctcaacgtttgatttctgcgtcagaggctggcgaatgacggattgccgcccagcttgcataatattcctatgagggttgagtgactgtgaccgaggcgcatcgaatgacaccacttacgaactagatagaatcagattcatgatggacgaacgagcgagatcttagatatagaagaagtattggaatctaatcatgagtgaaggaggatgaagatggtccgaaagttgaaagttgcaaattcaccccgcggagagcccctctcctacgggcctgacaaatccaacgttctccaaggttcctctactctacacttcacccatctaatctgcaattacttcaatccttgtcaacagtcggatcccagtccgtgggagaatactctcccgtatcaagcaatttcatatcctcagcctccaactcaaagtcaaagacatcgacattctcgcgaatgcgactcggcgtaacagacttggccagaggcacaaatccctgacaccagaaccattagcatcctgattctacatcatttactctctaggaaatcaatcctacttaccatctgcaaactccaccgaatcaaaacctgcgccggcgtcttcccatacttcttcccgatagacagcaacacaggctccttcaagcgactcccatgcgcaagaggcgagtacgcctcaacaacaatattcctcttcttcaaccactccacgatatccgaatgatccaaccacggatgcagctcatactgaccgacatcgatctggctagccccgctactctggatgtgcgcctccagttcgtcgaggtggtggataccgaagttagatacaccgatagatctcactttgcctgctccttgggcttcgactagtgcatcccaggaacccagacgggcttttttgccgccgtatggagcatggattagaatactgtatatgcaccggttagactgtagattccaattccatggggaatatccgtttctggattgtcgtggaggcttacaggtcaaagtagtcctgtgctgcttcttttaggctcgaatcaatggctcgcttggtagactcgtaccccattgattgcggcgggatcttggtcgtgaagaagacctgcgatcgatccagtttcgaattcagaattgcctttccgcaaggcccctcgttgtggtacatgatcgccgaatcgacctggaatctctttagtacggtcttcttgcgatcttcccggggagcgtacatggcggaatccagctttcagggcttcgagggtaaccttcgcggtctcggatgagggactatcgttggttaggagattcaggaggaagcattggttcaaacgtacatcatatagacctatattcatacaatgtcagctctgcttttgaaactcatctgtgtttgcggggtaactgactccgtatcctaagactgggatcccatgtcccgactgtagttgacgcgttgactggagagtcagctttgccatattgttgttaaattggatattcagaagacacaattcaacgttgtttgaagaggaacgatgaaatcatagagtagtcggtcatatatgccgcctatatctttaatgacgtatgacttcaataaccggattatctgtatctataagggacgattgatgtaagataacactctgatgtctttctaaatgtcatttttgtgattttttctctttacgttataaattctagaacggaggagactctaatagtaagaacaggtttattacatccaatgggctgtgcagcgcctcaccgaggttatatgaggcctacattcctcatacttttagccctaattccgacaatatctccaatcccagtcataagttgtagtgtaaagctctcaactcatattcacaagattacctattctggttagtactatgttggtctacaagcatcatccctgtcataatctgcccgctcttctacctccccccttccttcacgttagcttcccaatttccccgacgtccgacttctgacgtgttgccactgtcttcaatatgccaagcccggaaatagaggaatctgctcaagtcctagaatgtgaaccccagatgaacattcttttctcggctcccgacttcaccgtgccttccccggacaaggtcgatgaaatagtcaaccccgacaacattatctttaactagggcggcgtgaggatagccagaatatcacccgaaattgtcgtcgaattcggaacccatgtcacgttgaccgaggcgaaaaacatgatgtttgtgaaacaaaatacagaaacactaccagtgccggaaatcttcgcttgctacacttatggcccgatagaccgagatatcggagactacggtagcctatttgatacacatcttcatgactttcgtggaaggccagagtctcgataaagtttgggaatcttatgatgagaacacaaaagcccatgttaccaaccagctcaagcaatatatctgcgaacttcgcaatattcgacggcaactacataggctcgactgattccggccccattatggatccgatctttgagacttaccacgacaaaggttagcagcgactacaccaacatatatacgtgtgctaatacacatgtccaggaccctttaactccgaagaagcttttaataacgcaatcgtcgatgcctatcaatccaaggcaccaagatgtcacatcaagagtttcctatccggtatgttatgccaaaacaaacaccagatcaaattcatccacggagacctacgcctccagaataccatagtcaacgatggatctgtcagtgggattgtggattgggaatttagtggcttgtatcctgaatactgggaattttccaaagctctccatgtctagaggtggcaaaatgattggattgactacctagtacagattcttcgaccctattatgctgaatatgcggttcattcttttttgactcaaacattgtggtgatccaaattcttgggcagactacgtacggagtacggagtagcagtatccattcagaccaaaaagaacatttgcacttgctataatgttttgataaaagcaaaaacatgtattaaatgtcatgcatcacatgaacatttctaaaatccaacaacctctctatgtatgcagatacaaatcttcaaaccagccaactagttctttatttgcagctccttctgagcctctgcctccacttgttcttgcaacttacggtccgcctcgcgcttaagctggtcaggacgacgaagagcaatgtccttaggacggaagtcactgaacaggtgcttgagaacgttctcaatcaaccagcagccaccgtagtcgaagatcatcagcacggtcagagtcaccttgaactcattggtgaaggggacaaggcgcagcttctcattcagctcaggaatgaattcggtggcgcacgagaatgcaacacccgaggcggcgatgaggccccagtacatgcccttgttctcgcggattgactcgcggaaaggacggccttggtagttgatcgagaaagtggagatttgctggatcaactgcaaaaggtagatggcactgttcaggagggaaggctcgaactcgccctcgagatcaatattggaatctctcctatcggttgtgttagctatgaggtgggacaaatcagagggaggttcaacgtacggctcgtgcttatagacatagttggagaggtagatcagagtcacgatgtggatggcaaactgtccaagaacagatccaataatgtagacgttgaagatattcggctgcgggcgctccttagacagaccctcgacagacttcacattaaaacattagcaaagcaatttgtgaacgcggagaagtatgacataccttggcgcgggaaatagaaaggaagcagacactcatcagcataccgctgatggtgacctgtccatcaccgaacttaataccctccaagtagatgacactcagactgtacgcactgatcaagcagttcaaagcaagaatcttgtacatctgaatagtcgcaaccagggtgcaacgaccttgacgaaggatattcgggatagcaatgacgttggccaacttgctggtgaagggagcagcgactgatgcatcacccaacttgatagtcggaggttcgctttcatccagctcctgttccatcaaagaagacgtaagcttgtctgcaagtccagctgcggcggcctgagccttctgctgtttctgctgctggggggtcaagttcgatagctgcaaggcctgagcgccaggagatgtgatggttgggatagcctcgggggttccaccagcagcggtgatcgcggcacccttgcgctgcgactcccgctccatggctttctcgtagttagggttggaaggaccagggggatacaggtgagcgatttgaacagggactggaggggcaggctggttgaatctttgcatcatgctgacctgcttctcgtacagctccttcatcttagtggtccgatagtgttcagcgatcttagctaaatcgtctggcgagccgttcagaagcgcgacaccgacgtgagcctgcttcagagcgccaacatcgttggtgccatcaccgcacatcagagtggtgtatccagcgtccttaagaccaagaaggatgtcttccttttgcttaggagacacacgagcataaacccaggtgtgacggagcagaacagggagagcctgctggcccttgaactttgcgagagcatatccagtgatacagatgtccttagtcttcaggatctccgggtcgaggggcttagtggggtcgacgtcgatattgagcttatcatcaatggtgcgccagacaatcctggttccagagttgtcatgctcgggggcatcaaggatgagaacctcgcgatcaacaatctcaaccttgcgggcgacatggacagcagtcaatgggttatcaccagtgatcataacaacacggtggctgctctcatttagcatacggacagatttaatggcatcatccttcaagggacattgaaggacaaggaaaccggcaaaaattagctcggattcgatctcttcgcgaacgtagttgttcacgcggccctgggaaagttcggattcagatgaaagatacttgtaggcaagagccagcacacgggcaccattgcgggtgaagtgcttgtaggtttcctcgtagttgggaggtgtgttgaccagcatagtgttaatagtctccggggcacccttgacacccacgaatgtggacttgatcttcttggaagtcttgcggtcattggtcgtaatggtcgcgatggtactctggcgtttcagaaccgaggagaactggaatcttctcttgatttgaacagattcaacgttgcgaccggcaacaacgggggtgttgcccttggaagacagagtatcgttgtttcccagagtccagccaagccattccaatgtagccttttccatagggtcaccgacgacctcaccctcatccagcttgaccaatgcgtgagcactggcgagaacgagagtggtgttgggtccagcagcagagggattggccaattcagtctgagcaccatcagcttcaaccttcgaaccagcctcacctaaaccgagtccagcaataccatcaacgacaaggtcctctccagtcagggtaccggtcttgtcaaagcaagcgatgtcaacacgaccagcgaaagggatacggaaaggctcggtgcagaaaatggcatacttgctcaaagcagcaagactagtgtttacggccaagctcaattccataggcaattcgggaggaacaacactagtgatgatgaggacacagtcgagcagaagcttggagcgtttgcggtcctggatcacaccctcttgccacacgtaccacgaagcggcaattgcgaaaatcaggaggaagaggatgaacaacagagcttcaacattgttggcagagacacgttcagttgagtagatcatggttcggacgaggctaccctggctagtttcaaaaccggtcttaacaaccacacccaaagcaccattgtctgggggcatagtaacgttgttggacaagttcttcaagtccgagtcggcagtgagattagggtgagtaacttgaaggaccttggtacctccatgcacaaacgagagcttatccaatccttccggctcaatcaagtcaccgccaggacggagctggacagagtctttcagcagaggtgtgctctcgccagaaagcatagcctcgtttacaatgacactgccttcgaccagaagaatatcacacgcaacaccgctgtcctccttggtgcggttcactgacatgaggtcaccgggaagaagcttatcactagtgatctcttgccatttccgttcacgatacacccagacatcgtaaggcttaatgctcattccacggaactcgctcaaggtcctctggcgctgccacacaacggtactctcaaacataacgagcatgaagagcgtgaagagcgagtagtaccaatattcatccaacatccacaatccaacacagaaaatctggaagacgaagaacggcgcgacagcatgctcctggaagagttcaaggaaaccgggaaccgggatatcaaaggtgttatcgccatagtggttgtagacgcggtcaatctcggcctttgacgtgaagccctcgctcagctggaaagtctcgagggcgggctttggttcggcgtcaaggacataagacaagggtgcgaaggtgcgagtctcagggtaaaagagaaagcggcgcttctggaagagaaacgaaagtgtcttcttcgtgccggtgttctcattaatcaatttgcagatctcggcagagccagcgttagtgatgggaaccactttgataagccgggcagtatcgatggacttggctcgaatggtagtgaatagagtgttgatatcaatgttccacttggtcatcaaccaaaagagcgactggattgtgatgatagaccccgcgaacacgaaggtccattcctgtccctgaatgtatgtatcataacgctcgggggagaggtagaaggcgaagaacacgggccagatgattatgaaaggccagacgtatgtgtgtaattgccaagggatcgggttatgcaacgaagcagtatggatctgaggatcgtccacgagctttgccctgtatactgttagctgtagccgcaaagaatcggagggagcttctggtaacgtacatggtggcaatctagtgaccgcggtcagagtctaacaagctgaaaattaaagactcatacgaattccgaaagcaatgatagtatccaatcgaggaaatgcccagatttgttgatgaagccaccttccaccttacaatttttggttccagaggattcgccgctcgacgcgctatcattatgtcagcctgccccgaccgccataggcttatgtagcactttaccgctgctttctacaacagcccggccgggctagctcaatcggtagagcgtaagactcttaatcataaggctgcgggttcgacccccgcgttcggctattcctaaaaccaaacctgagatttctttttttgatcttttcatttgctcgtcgttattagtatgttaatatgtagggagtacaacgtatgaattttttttttgagggagggaatgtggaagatgatgtctgaatatagactttgtgaaaacgtatatgcttgcatcaagacatattaagggatcaacctcaatctaatatagagtacataatgtcccactgtcgttctctgcttcagtgtttagcatgtcgatatatataactcgttttgggcctttctagcttgctccatccgccttcttgtccatcacctcccgattcaactccttcaccattcccgtcaacattctaacctgctctttcagctccctgagttcatatgtacaattatcaagcttgatatccggcatggactccatgacctgctctttccaagtatcatcaagatcaaagttgacatctgtggccacatgctcccattcctgggcatattcatcgtctgcttcgccatggcgtcgattccattgaatctggcgtgcccgactggtctcaacccaggccgcaaagataagcagaggagaatagatcacacccattacaaattcattcagctttgcgtatgcgttccgcgaaagccaccattcgaatggggctattagaaacagaatctcaatgagattgaatgctagtatccagattaagttagccacacgtgtgccatcgaagcggaaaaaatacgtacgcgggatgaagacattttcatctggggcgcggatgaactgcatggttttctgcgcaaagatggccatgtattcgtcagtggcattgcccgagatatcttcatatgcgctgttgtacaaggcaatgagaatattcaacaaaactgataattgtcaacataagcccaaacaagctggacgcaaacttaccagtcatgacaatgaagttgaaaacataatagaggatgatgccaaagggaaatgcaaactcctggaaagtgtcgaactcaggactctgcatgatactgttcaccattccttggagaatgtttcggtgaaggggatagtcgtcatccacttgggccatgccgacgaaggcctggaagaaaccagccatcaccacaaatagaagagcaaagaatatcaagctctccttcatcatgacccggaggaccacaaacatagcaccgaagaagcggaccgagtcaaggtatagcatcatgcgcatccagaacatagggcccgcaaatgccaagaagttgtagctgagctcgttgtatagccgcctttgttcatcgttggcagatgttgagtgtgccaaggcaataaaccgcatggcaagtgacacgatcaggatagtgtagagggttgagttgaaggcattccagaattcgaggtaattccatccaaccttccaaaacttgagcccttcgtcgcagatgaacgcaacagtcataccgtaaagaatgccctcggccacgtccacgtcaccggttgggttcacggtattgatgaccgccgtataaaccgcaaggtaaaccaaggaaaacaaaatttggcagacattctgatacagaggagttcgcatccggtcaggatggaaatgaacccaatagttagtgttagccttctcgctgtattcgacaaagttagttgggttgccctcttcctgacagatccaacccctccacaggtacaggatacatctctggtacggggcagagctgatgattttcaaggcgtggagatctaccgatcgttcaatgacattggcgggatcagtctctactccttcactgaagatggagtaccgcttgagcaagatatccttcagcacgtaatcttggtccggctccgattcgattctgttcaaagtagtgagtaaataccagaaacccaaaaatatcaaagggatattacatgcgcttggcgatgacctcgcaagccactgcccgaacctcgtgaagatcggaatcccagagctcgacggaggcttgaatcttgaaccatcgcagacaaactaaaagacaataaacaacgcatgctttgtattcatctcccccagccttcatggctgtcgcaaccacatcgtccgtgatgatgcggctatttgggtcggtcaagaatttatccttcacttcgcatgagacaacctgctcaatttgatatttcaaccgaagagcaaccttggcaagttcctttgaagcaccagaggcgtgaggctcatcagcagcataggcaggtagcactgtgacttgttagcacattgcggtgccgattgtttagaaatgacgtacgtcgacgacgttccacctggatgcgatgccgcgtcctgccaggatcggcggtaaagagattcctccaatgtcccatatcgcgtagaatatgcaaaaataaatggccacaacaagagtgcaaagactagaaaggggagagttcggctcacggagtttctagcttgaggggccaccaatgatgatcggcggtagataaacttcagctccccgccaagtaatgggcactgggtctgaattcgtaaggaggcgaatgtatctctatatgttggtgaatatgtgtctttacaggtacaggggtacgaattgcatttaaaagcatgactggcattgaacgtctcggttgcatcgcaaacattatgtgcattagaacttgcaccctgttgtgcgaatccagcgtctttgacagacggtgggcacgagggtttcgaccgcaattggcatgcagcgcatgcacaggcgtggataaatcatccccagacccgaagttcaggcgactgcactggctaaagggcgagttctgactgtaatcctgcccattagcacattgagccatcgagcctttctccgatatgtgcaagcttttttctatccattttcgccaaactcccctctagcggcgatctccgctttgtattccagcgcatgaccgccgtatgcccctcgactcggagttatgacccataacttactcaggaacaccctcatcactttcagagtcttcatctccgctgacctgggtgttctcacgctcacgcttctccataagctcctgcaggatcgcatcgtcgtgctcagtgacagccttgggtgccatcttcacggtgcagctaccgccgttcgccttgatacgctcttcgattttcacaatagccgcctcgagcaacttaacgccgagggtcttgtcgagacattggctggccaggacgtagagaggaggagccaccagtctgaccttgatctggttctcgggggtgttgtcggcctcagcggtacggagggcatccttgacggcatcgattccatcgtagccgaagcaggtaacctcgatatcggcacggaccttggtaggatggggggtcagcttgctgctgatgtattgctgcagctcgctcttgacggcatcgctagggaaggtgatctcatcccagacgttggggttcctgaaaacaattgtcagaatttgatcatatcacgagacaaaaagcacgaaaacctacgtaatggagatcttgaaagcatcgtgcgcatgtccgtatttctggttcaaaggccacccgatgttctcgtatagggtctcgaggggggtctgggtcgcctcagcaacgtggcgcatgatagagtgcactgccttgctcttgttgtaacgttcctcgcacttgataacatcctcgggggagacacgtcgcttcgacagatcaatgtaacctttaagttgacaagttagttctcaggttcttcgaggcaaataatgtatccttgcctttctccttgtcgacacgaagcacgatgacgacctcgttgcgcccaatgcggatgagcttttggatactgcgaatacgtctgcgggagagttctgagaggaggatcatgccatcgatgttgtcgtattcaagcagcttcacgtatgcgcccatctcggcgatctagctcgttcacacaaatagtcagtccctgtcgctttgatctcttaggccattattcagtttattcatacctgcttgacattcaccatgacaaagctgtccacctccgggtacttgtcctcatagaaccgacaatttgttaaagacatcttggcggggttctgtttttttttcctcggggaaatcttaggtgcgaacaagacggatttgacggcacaatcgagagatcgatctagtggccaacagtatatgcgtgatcgtgaagtcggagatacaggagcgcagaagagagaggtaacgcgaatgaggcacaatctatctctttgtggcggacttcaaaacccacattgacctgatcggtcacgggactaaaaggcacgtggttatgtaattatctcaccgccttctgcacttggaagatttggtcctccgtatggtgctatgctcggtttatatcgtaaattgggtaactatttggctattgaaaagaaaaagcatcagcccaacaccagcctagcgatccttgtgcgcaatgctcatgctggttttctggttgctgtctagcttgcttataatttcccgcttcttttcttcatcaatctttttgggacgcttcttggtcttcatcttcccctgcccttggtgtggaactagtgactgagttgtttgaaggcttccttttggttcatcttgctgaacttgttcatataccgcagttggacgtcgggcttgtattcgcggttcaacacgccggctatataacgtactccctgctggtcacagcttactcctcacttcatcttctctgtcgattttcaaaatgatagtatcaatttgttcgattgcacggtttatgatagagtttacacggagtttttctcttccccgtggtgctttcggcttcgcttgcatgaatgcaagtgacaccactggtgaggtggcagttcgtgtataaactaaccagcccagccagttccagtggtgaatggtatcatcctcattgcaaattgcagcgcggtacttgaattcatcaagctctggtaggggactggctagctgtaaagtttgaactggctccgaggtctaggtggaatttgggacgctgacatgcgatgtgataaggtagaaaggtggtaccacatttaataatatataaatatacctgcagaagcataggcgtcaaattgttataagagaaacccgtatacagttcgtcacaagttatatagagtgaatatatcacctgaccatatctcttggctgacacatcagtcaattgcgtcaacggaaatcaagggcaagatgggcacattcggcactcgatgtccggcactcgatggcatccgacatttctacgaatcagggagtttcttttgattatgctgaccatgccttttcccttcattgcacagtcattctccgaggatctgcgttgaattaacgataacagtcctcgggttgctttccccgcttatcggttccttagcgccgttggcccttgccttaccgacacaaacagttcgggctggtcccaatttcgaattgccttagtctttgatctctatgaccagcatttatggcgggctgtttcgtgcttaactcttaaagataaaacacctctttccagatcatgtctgagacaggttcattactccctggggagtctgacggactcggacgtccgactctacgagaccgcattgtcgacgctttccgttcgtcacctccaaccggtcttgggatctcgacaaattcaagccatgataataacacggcacatgatagccaaactggtaccggggctccgagcgaaccagacgtgagaactcgacttctcgaatcatacctccagcccgatcctgtgtgcggcgaaaggcgctgcagccatggcacgttctcgccgcggatagaagatacaggaagagactcatacatcggggggccgggcgcatttggatataacggacatgaattggcggacggcgcggccggtcgccctagaggtatagtagatcacgagtcggtctcagattcagagactccacagttgaaatcatcgttcacttttccaataaacgagacgaataaacagtaggtcgtatcttactcttatactgcgagcactttcgtagcctgcctcaagattggtaactgacgaatcgatgacagatacatatcctattatattccttttttcaattggattggacaatatcattggtcattcctgcgcggagatctcatggctgcgttgaccgtggcatccatctacatcccgatggccctctctttggcctccaatcttgcacacgcaccacccatcagcggcctctactctttcgtgatccaccccttgatttatgccatcttgggaagctgccctctcttggtagttgggccggaggccgcaggttccttgctaacgggtgctattgtcaaagcaagtgtcatgcaaggaagctcgggcgaggacgaccctacagaaatcgctcttgttgtaggagtggccactgccttgtccggcgccatgatactcattgccggactgacccgcctaggattcttggacaatgtgctcagtcgaccattcttgaggggtttcatcactgccatcggctttgtgatttttgtggaccagcttatcccagaattgggtctggccgagcttgccaaagaaacccgtgttagccatggcactagtgttgaaaaactgattttcatctttcgatacgctcgagagtgccatggactaactgccatcgtttcgatcgtcagcttttctgtcatcatggtgttcaggtgcgtaccgtatccccgggtttatattcaccatactgatcctccgcagaactttgaaaaagatgcttgtgcctcgtattccccaagtgatttatttcccagaccgcttcctggttgttgccctgtcagcagttctggcttggcacctcgactgggaatctaaagggctcgaaattcttggacctacagaagtcggctctggaggactattcgctttcacttggcctttccagcttgcatatatgaagcatgtgcgcacagcattgagcaaatcctttattatcgcgctccttggcttctttgagtcatctgttgcggccaagggcctgggcggaggcagttctgatggtatcaagggaatgcacataagtgccaatcgtgagatggttgcactaggcgctgccaatgtcatcggaggctgtttctcggctttgcctgcttttggcggatacgggcgaagcaagcttagctcgcagacaggagcacggtcacctatgactagtgtttttctcagtatcatcacattcacatgtgtcatggtgcttttgccttatctctactacctcccggttcgtccctctcaaatatataccacacgtgtgcttttccaagtgctgaccacatgattttccaatagaaagcagtcctgtgctccatgatctccgtggtagccttcactcttgtggaagaatgcccgcatgacctaatcttcttcttccgcctgcggggctggtcagagcttgttctcatgttcctcatcttcacaacaacaatattctactccttagaactaggtatggcgatgggaatgggcctgtcagtgctaatcctcattcgacatgcaaccgccccccgcatccagatcctgggcaaggtcctcggcggcacaaccgcgcgtttcgacaacgccgagctccacccggaaaacgtggagctaatcgaaggcgccttgatcgtcaagatccccgagcccctgacctttgccaacacaggtgatctcaagaaccgtttgcgacgtctagaactctacggctctactcatgctcacccttccctgccgcgcatgcgtgctccggaacacaataaaaatatcattttcgatgttcatggcgttacgagtatcgacgggtccggtacacaggttctttcggaaatcgtacaagcgtacacagagcaacgcgtcagggtattcttctcccgtttgcccaataggagtgtgttccgcatgtttgagctgagtgggattgttgagacatgtggtggattgagtcatttcgtccctagtgttgatgaggcgctgcggttggcggaatctgagaaccagacacaggagatatagtgtgtctaccttgctggaattggtgacatgtgtttgggtacagtttggatatattgtacagacatattgctctcgatcatctaaaatataattaaactgttatactacttgacattttgtcaaggtgcaagttcaacacctatccatgagcaattacttattttccaataacgagccttgcttttcttgggtttaatgggaattgaaataaacccttcatgctttggtatgcaccatgatcaggagacctgatcgtgccattctggcgatgaaagcctcaattgcagcatccgcagtacgtatcagggtgatgaaccactaggtcaaaacatgactagcagctgcaatttagccgccccggtttgcacttagttgcaagtggtgtattggcgatgagtccagcggattgaattgaatagcttcaagaacaaagctattagcaccgtgaatccaggcagggcatactggtcggttcgcactcgcttcttccgagctcgaaagatattataacatgtcccagtttcacactggcacagaaaaacacccagaggctcacgtagccgaatgatcctccacaacagccttccggatcacctcgagcagaagcgcttccgccgcccccgaaacaagttcattactgtcgccttgaactcgagcgccctcatctccatccccatcctcatccccggcatccctatcagcagccacaaccagtttcacacgtccttcgccacccaaaacgaaagcagcacatgcaaccttcgatagtcgcacatgctgcttagcaacctggtccgaagacgacccatccagatccagcttcatggcaagatgcgtctccaggtacgaagtaagattggcgatgagaggactgcgcagtttatgctgaaggcgtgattccggcgccgactgtccagactgatcgcgcaggaagtccgctagtgaagcgcgcgtgatgctgacattgagggatctcagcgccggtgcgatagacggtgaaaaggagagcgtgagctgtaactctttgataatatcttcgactgtgtcgcttgtacttgtccgttgagtgcgcagggtgtcaacgtatgtctccagacccgcgcagataaagctcgacggcagtcggagtggcgagcagtaggtatcgaaattggtagataggaaggtgaggaatgtttgccggagcgcagttgggaatcgggttaggaggagagggagagatgtggatccggtgcgctgcgttggtggtgattttgtgtctgcgagcaaagctgctttgtagatgatgttttcatattctagtgttactagaattccaggaaatgtgatactctgtgatctgcttggcgcttcgtcgcgcgatggttgagaagagattggccgccatagacaattttttagggcgcctgttttagaaaacgcgtcgtcgtctgctgcaccagtgcttgtatgaataccagcgaggacatcgcctgtgagatggtctcgtagacgcgttgcatatgtttctaacgcgacctggttgtctaggagggctttatagtccttcccatgatggagaggggagagccggtggatggtccaagaagtgttgaacaactgtcgtttgtctgcttgttccatggcagccaacgcacgggtttgcaataaactcggctaattattatgctacaattgaagcatatcgtcgtcgaggaagattgatatttggatgtacagtgacgcgtgccggtgcaaacaaagcaaacatctatcaatttcctaactaccagtacgtcttttggcttcagaagagagaaataaaagagtgaaatggaatgcaaatgcaattagctgaaatgttcatctatccaactccaatatatgtccggtataaaaattaagaccccaggcgcctccaacactcaaattcaatgtatcatgcctgccatcctctcgtgggatgacaatccggacacccaaaaacaattggaataccattccagatccagacgtgctctacgttatggggtatcgctttccgggctttcaactcagcctcagcggctgcaaaccagatatcttgcactgaactatgcaggttctgcgcagacacgcgcgcaaaaacaaccgagtccataggatccttttcatacatcgtcgtgtcctgatagaagttgtacataaactctttgcgttgcgctcgctggctcccaccgtccccgatctcagcggagaaaaactcaacgatccgcacaaacggcgccaatgtgagcaacgagctaatccacgagtcatcaatgtcatgtccgtccaaagacatagcgtagcgtatatatgaaacaagcagatgcatgcaatggtgtgttgcaaccaacgccgccgtattggtgaagggagggctttggaggatccgggtttgtagctcgcggtacatcctctggcgtacctcgagcggtaatggtacagggagctggcctgcctcgtatttttgtacgagcatgttcgtgtgctcgcgccgggcggatgcatatgattcgaaaaaatagagtgtatagtacctggtagagaagaggtcagtgacttgctggggtgaagcaattctgcgctgtccttacatgagtggtgcaaggtggaaccatatgctagctatgccgcgttttacaagggcgttgcgctcgtttcgctttgcaggaaatgaggccttcatgacggccggttcagtctggatgaatcgatcgaggatccggtctgccaggtagtagcagagccttgagcagagcatttgccgtcgccgcagcccatgcaagtatttgaaggtataaagatggccgcccctggcgcttttggatggtgggaatagatccgataacagcacgacatcgtcaccggggtttcgagtatagattcgatcattgtcgatcggggatggaagggtaccgtggcgacgcaatcggagatactgccggacaatctcatgctcgttgctggtgagcagttggcaaaaagccttgcatacgagtctcagcggatggaagtctgtgatgccggagtatgcgaatatgcggatttgaatctcgacggggaggtcccatggcgagggtagtggaggatctgtaggatcctttctaacagcgaggtgagtcagtgaaattcgcggcttgtcgcaaaagatctcaccttaaagttgatccacgatggtccttggcacccacctttctcctgttgtggatcgcagcccgtactttctgaacggagagggcgaatttggcaaagccactcattcttgggccctgcagcacatgaattgactggctcccaacgagaagcgcactttaccggggctcatggagataaaacaggttcattgaagggggcaatcttaggctaggttccataaatagcacatgactaagcccctcgatggtccaccctcgagggctgggcactccgtccgatcaaatgtattgaaagacaactacggagtgattgtagcatccaagggcaaattaaatgctgttatttctagtagaacatgataagcttggctctgtcgaatacgagcaactagaccaaggtagtcaaacaaacatgcaaggagcaagatgaatgaatcatggttccacttagatgcaggcaatggtctgatatgaacatgacatagacagtagtcaagcttgatatatagactatgcaagctgcgtcgtacagaacaaactgcccagatggttcgatggaatccttacgagtttatataggcctgggcatacgtcattgcgtcaatggcgtgcccaacatatatataaagacctccctaaccccataccttaagcatatcactccaactcacaaaatggtcgacaacatcctcattctaggtgccactcggggactaggtgcctctctgcggacactgtactccgcaaagccaggaacccatgtgtttgcaacctctcgatcttccaacccagagccaagctcaggtgtcacctggctgaccggaattgatatctcccagccagatgtggggcaaaagcttgtttcgcagcttccatctacaaagctatcgacagtcatcattagcgctggttactttggctttgaaacattcgattctccagactgggagaaggaggttcagatgtatacgacttctgccattggtcccgtctttgtggtacacaatcttgtcaaagccggattgttggaccagggcagtaaagtcattctcgtcagcagcgagagtggcagcatcacattgcgccacgagaaagaaggcgggggtaactttggccaccatgctagtaaggctgctttgaatatggtcggcaagctcctaagtttggacttgaagccaaagggaattgcagttggtctggtacatcctggattcatgcggacggagatgacgaagagcgttggatttgataagtactgggatgcaggtggaggtgagtgaccattttacaggccttatgacaaggcttcgggaacttgttaggtctaatgtctgacctatatctcttggaaaacagccgtgacaccagatcaagcagcgaaaacgcttgcatctttcatcgaagattttgatcttagcaagaccggagaatactgggcgccagcaggaccagggtaagaaatttgattgtctattatataaacccaggctaatctatcatgtcagagatatcggcaccgcagaagttgttcttgggaagaacctgccgactcctttgcaacttccgtggtagagagtgaaatgatgaatatgagctaccagagccacgagtctacttcttgctcaaacccaagtacctatactaggcaccaaatttagagtaggcatttcaatccgatacccccggtctcgcacacataaacaccaaatccctccccatgtcctttcgttcttcatgcccaatgactttcacaccaagaatattcgcgtagaaagcctgcgtgcgctcatcatccgtcatcaacataatccgacgtagataaggcatgttttccttggaaaatgtttccgcaacacaaccgataagccatttcccaagtccttggccttggtactcagggagaacgtaagtatccgacagataagcaaatgtacaaccatctgtgatggtatgagaaagcccaatctgctcagtgttctccggagatggggtggtagcatcattcacaggttgggtccacctgtacacgccgaagcacaaggagccgtagagcatctgccacagcaccttctctgggatgggctcgttgacccagtaaatgaagtctctgttgagtgcggcattgactgctttgacagagagtaactttggatcggttgagatgaagaattcgcggttggtatctcgtgtccatgtcttaggtgggagtacacttgttggcggggtagaggacatggtgaatgtggggtgctgtatgctgggtgcgtgctggattgtcttcgagaaatgcaaatttatatgcagttggacttcaagaaatggatggtatcttgagatgagttcgttgtatggttataggcgaagagattgtagtctgtctggttatcgtgagtcatgcgctaaaactgcacttggcattacctcaatcaatactctgtacatgagtctgacaagaacgactatatcgcgacctgccgacaaatccaaaaatgaaaagctggccgatagctcttcatttgtagttgatatcggtggaaaactggggttgatattcctcttaagtatccggagatcgctgctgtatcactgtaggatcttccgagattgctcaggtgaagctgattgccaatgcgcaagttgataagagcaagttgataaaaagatgacggctatgttcgtgatgtgtaagaacagcgccggtgtagtcactcgagagactcgggtatgttttacacctggggagtcatccatactttaggcacgtggttcttcacgactgcctaataaggctaagcaacctgataaacaccaaaacgcaatggtcaagggctactccgagctttaatttatatagttccgccaatagaagcatagttgggctgcaatggagatgatgtcgctgttcacacgaatttgtcatttactgtagttgtgacagtgctgtatccttgctgtagtagataatgatctgtactacggagtactccgtgcaatcctttgatatgcaaccttggaaacatccacgatattaattcgtctcttccagaacttcaccgtttaaataccttggcattcaactcgaatcggccgagacaaatggcgacatttcaatttccaacctcgataccccaacttgtactccaaccatggcactccgcaatggcgtggggagtggagaggatggtgttcacgatagcccccctcggcacgccatctggaaccgcgatggtgttagcgacatcaaatcagtcccgagaacatcacaattatagccgcataaccgactgcaatcgtcccatatgaagccaattatcagattcgatgcgctggattgcaattcgcattatgtggcgtgtaaaacgttgcgcatgacgtgcaggtgggggtgaatctacaagaatgccgggatatccaactatgcgacagcggttacatgtttgtgctgtgattgttttactccagagaaaagataaacggataagcccatcatgactctcgtacaagtgcccgtggctctttcctcaaatatcgaacctgtctcggaatcgatcaagggtccttcagaccgcaatggatcgaccactgtaacggtgaatagtgatatcaccggattatcagagaagcttgagaagatccgatttgaactggaggagcacccggttgatgtggtgcgacccatcaaggtcggtattatcggcgcgggtctggcaggaattaccgcgggcatattgctccctgcgaagctaccgggactggatcttcgaatctatgataagaatgccgatgtggtatgttaatgtccattgatgagttgttcgacgttaacattctttagggaggcacttggtttgagaatacatatcccggtgttcgctgcgatatccctgcacatgtataccaatccagcatctcgccaaatacccaatggacggaagaattcgctcagggagatgagatcagacaatactggcagggtgttgcacggaagcacaatgtgtaccagtaccttcgcgcgggacaaaaagtgcagaaggccgaatggctgcccgagaaagggaaatggaaggtcactgttgagcatgtagatggctccaaggtaagaaatagttattgttaatctgaacgttctatgcttacatccatgcacagatctatgaggaagagctggacgtgttaatcaacgccatcggtcatttcaatgcctggaagctacccgactatgaagggatcaacaattacaagggaaagctcttccattcctcaaactgggatccaactaccgacctgaagggcaagcgaattgctcttatcggaaatggcgcttccggcttgcaggttctaccctctattcaaccatttgccaaccacgttgatcactacgctcggaatccaacttggatcgcagattcattcagcagcggaaacgttggaatccgtcgactggagccaaattcgttctccgaaacacagctagagacatggaaagatcccaaggcgtatcttgaataccgcagggataccgagaagggatatttccagcgctttggagcaatcttcaaagacacacctgagaacaacgaactgcgcgagaaatggaccgccctgatgctgaagcgtatcgcaaacaagcccgaattggcagataagatcatccccgacttccccccggcgtgtcgtcgcccaacaccaggccccggatatctagaggccctatcccaagacaacgtcgactacatccagacacgcatcaaacgattcaccgagaagggcattgtgaccgaagacggggtggagcgcgaagtggacatcacgatctgcgcaacaggggccaacgtcgaccacgcacccccgttctccatcatcgccgacggagtcgacctaaagacagcctggaaacacgatggcaaattcggattcccttactcatacctcggcttcgcaacacccgggttcccgaacctcctctggctcggcgggccatacgcctctggacacagcggcacagtgcccaacaccatcgagaaccaagtgacatacatcgcgaaggtgctgcgcaagatccgctcgcagggaatcaagaccatcgtcccgtccgcccaggcgaccgatgacttcgtcgagtactgcgaccggttctacccgcgcactgtctggtcggcgaactgtagctcgtggtacaacggtggcaagcccgggtctcgtatccacggtctcttccccggtagtgcgtcgcattcgaattatattcgtcgggatccgcgctgggaggattgggagtatacctatgttaacccgagtgggaatcggtttgcttactttggtaatggctggactacgaaagagttggctcctgatgcggagctaacgcctcatctgagattgcctgaggagattgatttgaaatctcacatggagggatggtgggatgtttgatttggtatggagttcgttagactggatcattccaatgcaagagtgttagtgtctatttggatatacctatacatgaattagcgctgggcaatactattttttttcccctatttgttgagactgttctgataggacctgctccctgccttgtttagtcttcttctcaacacagtactacccgtggtttcctttatcatcactatttatgctcagtatagatttgatatgaagatgaagccatatgatattctattaacaagggctagcaacaattttttatttgttctaatgcagatattctacttagattcctccaatgaataaggaggcacctcctggcccgctttccagaagtatttcgcacccgggtgcgcatcagggagtctggactgacccttctttccgtacatgttctcacggaaagttccacccttgacagcgtagtccgaccagaatagaccacggcgctgcaactccggcagaagtagacgaataacatcgtcaaaggtatcagggagactagcatagctgaagttgaaaccgtcaacatcacccacagtcacccatcgctccagctcatcagccaccgtcttcacactgccaatgatcttgacaccattaccaccgagcaccaagtactcagcaatagtcttcttatcccacttctggccctcagtgccaggcaccgtactagcccagtggttcaccatactgcgaacagcaggaagctccacgaaacggaagtcctggtcatcagagtaggtagacagatcgtaaccagtccagccaccgaagagagcaagcgcgccctcccgatcaccgtatgtcttcagctcctcgaacttagcatacgcctcctcgtcggtctcagcaacaatcaccaaggcaccggcaataaccttgatatcctgcgggttgcgtccgagctcggcggcctgctggcggatactatcaacggaaggacgaaccagctccggcttctgcgcatgcaagaacacagcctcggcatgtttggcggcaaacgccttacccgcggtcgacgtaccagcctgcaagataaacggcgtgcgctggggactgggctcacagagatgagggccgggaacctggaagtactttcccttgtgattgatctcacggacagccttggggtccgcgtaggcctgggtcttgctctgggtgccctgcttccaggtcacggcgtcgtctcgccaggacgcctcccacagcttgtaggtgacgtctaggtactcgtctgcgatgcggtagcgctcgtcgtgctcgacctgtgtgtccaggccgaaattgcgagccgcggagtcgaggtacgaggtgacgatgttccagccgatgcggccgttgctgaggtggtcgactgtggagaagcgtcttgccagcgcgtagggggagtcgtatgttgttgaggctgttacgccgaagctgattgattctgtggctgcggccatggcgggcacgctgtagagggggtcgttgatggggaattgggcggcggcggggattgtcggagtgaggttggaggggcctcggtatacatcgtagcctccgaggacgtctgcgaagaagatggcgtggaatttggcatcttcgagcttcttggctagggcaatccagtgcttaatgttcttgtagtccgcgccttggtctgcggggtgacggaatagacctgggttgagatgactcggcgagtgcatcgcaaaggcattgatgatgagttgcttcttttcggaagacatggtgatggtgagggtggtgtttgacttgggatgattgaattgagttgaattgaattgaattgaattaattgagtctacaacagctctagaggggtagattatatttattgtccctgcacgtgttccgtatctgccaaccccgcggtgcattgtcgtgagacgtgcaaaaagacgtgcagttggaggccgatggcgtcagcatgtaaatgtggggtgatacgtaaattgctaaaagggttgggattccaaggttctcatggattggattggatcggatttgatattgaaattcgtaacatgtgttgtgctctctacgtttatcttctctcgaccgagtgaagtatggcgcgatgttatcccaatcaggaatgagggatttctcttcctttcatttctatacttgctccctttttaggtgggactatattcatacttggcattgatcatggtgaaatggtcaattgtattcaccctcccaatcgttgttctacattgaacttgatgctcaattgagcagtggtataactatattcggggttggtttaacctagtcgttacccgatttggtcgattttcgatccatactacttcttatatagaatacaagccccaagacaagaaaaagtacgtatccattgttattcagtctatctatatttaaaaaaatatacaaaaggataattgtaacatcttctaaccgtcatactaaaagcaaaaaaaaacaaaaaatgagtgcatcatccgtgaatcgaacacgggcctcgtcgatggcaacgacgaattctaccactagaccaatgatgctagttcatataagagggcttactatttcatatcaagtagtttatgacggtgctgcttgttaagcgagccctagacactgcctcactgagtcttggggccaagccaagcacatggggccaaagatctcttgacccgagcttccgatgtctcgtattcgctctcgctttcgggagggttccaaggttctgacagctcgtgtggtggggaatataaagttcacggcatggctgtgggatccgccttgcgccctggaccattaacccgtagtctcaatatcgacatacctgtaattgccatagttgctatctgcgaaaggcaaagggggcatcgtggctttttctaatcctggggtgtcatgtcggccacagcggatctagagctaccaaactgtcaacaaagattagtgcatgtaaatagcaagggcgaaatatatttttgggtattataccaagcccggcatgtctgcgattgttgaacgctcccatgaggtggaagcagcttcattgacggtatgagctgagtgttgaatgacctttccatcccttcgatattccattgggtccaggattcaaatattctgggatgaaactctgcagaggcctagtctaccatataaatcctaccatctggttgccagataatattcctggtgcaatatgcaatgccaaagcactaggtctttccctcgcctggaaacaatctgctgttaaaccatcgtcaaagctcaattgagtcttccgtctcaggctagagaatccctaagatagccccccgccaaggtttcccggatgatttgcagtgagtgtgctcaagtaatcgagcacttgcgctacttttgctatcagatgagaatcattaaaagggcctttcacatggcccttaacgtatcccataacgatatatagccacgcccgatcggtagagaaacgatggatacgcgggacgcgggatagtatgatcattgagttcgtaggtttttgataatcagcctcgtcttcactgagccttgtccaaatttgataacgatatcattcgaaatccaataagattccctgcttggcgcccgcggacaattcgatcaagagccttattgatccacagtccgaaaaggtagttgagtccatttctcccaaaaaagggtgatcgtatgaagttcaaagcggcagagtttctgactgtgactcgggcggtcggttttagctacacgaggaggttcgagcactatgacgacgcccagacatgcccagacatgcccgatcagaatgtgcaatgtcggcgatgcgacgcaggattcgaggaatgggaatggaagattaccttacatttactgctacaatatatggcttccaacctttgaagctatagccattgccaccttgataccctacaatatggatatcaactagttcgcgccgcaaacagccatgacgatcctagctctcattcggccccctcatgaccagcgcccgacaagactcagccatggcaagagggaggcttagaaccgcttatccaatcatatccagtcctgtgggcattgcccaagtgaagacatggtctcactgcggggaagcgcagggaggttgtgttgtttaccttttgactttcgaacatttaaaaccttacgacttccccccttcttcatcccttctaaatcaaatctctacctttgaacatccaaatccaaaggtccacaacactgccataatatttgaaccatgtctgcaaacggcgcaaacaccggcaaggctcccgcccccaatcatggtcatggagcacatcaacctctggtcaatgttcagccatttcatatgagcgatctgcagcccaaatacgcgcatcaaatcgatcatgaggatgataaccccgatgcgcatggctggtatgccggtttgagtgagttacaccaatactgtatgcgctgcgactctcttcctaaccatgtattcctcgtttagtccacggcctgggtgaatgtatcggattctttggagctattccctgctgcatctgctgcccgaaccccttcaagtcagtcgaccagggtgcggtcggtttgatctcgcgattcggacggtaagtgatcccctctccgccatgcctccgaatatcacttactgacaatgattaattctagcttcgaacgatcggtcgatcctggtctggtcaagatcaacccgcttagcgaacatatcaccacggtcgatgtcaaaattcaaatcgtcgaggtgccgcgccaagtctgcatgaccaaggacaacgtgaccctcaacctgacctccgtcatctactaccaagtagtctctccccacaagaccgcgttcggtatctcgaacgtgcgacaggccctgatcgagcgcacccagaccacactacgccacgtgatcggcgcgcgtgtgttgcaagacgtgatcgagcgtcgcgaggagatcgctcagtcgacttcggagatcatcgaggaggtcgcagccgggtggggagtgaaggtcgagtcgatgctgatcaaggacataatcttcagcaacgacctgcaagactctctctcgatggcggctcagtcgaagcgtatcggtgagagcaaggtcattgctgcgcgcgccgaggtcgaatccgccaagttgatgcgccaggctgccgacatcctgtcctccgctccggctatgcagatccgctacctcgaggcgatgcaggccatggctaagaccgccaatagcaaggttatattccttcctggccctggccagcccgggcagacgcagcttagcactgccgagaactttggcgaaggtcctagcaagtacggcactatctcccaggacgataatggactccagcatgcagtgaacgctcgcgttgtcgaggacatctagatgcgatcttgatgcgttttcctgcgtcgtctcgttctccttttatttaattggtcagtctcttgcgtgaaggcatgacccttttaccctttccggaaggtggatcatttgaagctgttcctcgacagctcattcgtctatgctccctggattttcttatttctgtattatggctggacgtgactggatccatgacgatacccaccttcgtttgcgctactatcgcagctgctttaatgtctctttaatgcccctatgactgctttatcataattatttcgtctaatgcaatgcagcaatgcaattcttgctatatgtttctttctttcaatcgcacctaatataccaggaccagtcagtcggcagcgataaggcacgtataaaaacgcgtctcacatgatagtagatgcgccacctttgaatcatttaaaataactgccggtagaaaggctgaaagggtttaaatcactgaaatccacttatgaaccttgatattctcgattatgtacatattccgcacccctaactcgatcagatgttttgcgcagatggcgttcccgatgaggctcagttacagccaagacatggcatcttccagagttgctattattgcaacagtctgattcctagaacagcggtgaggggatctataggatttgttcggatgtagtttgatttggtttgtgtatgatattgacttcttactcccaactaccctctaccttccaatctcattcgatcaactatatacttaggtagtaccccgaacactaagaaccctggactctccccagagtctgatcctatcccgatcccgatcctcaaaataatctactactggttcatcttagcccggatataaaatccagagccgctccttgccaagtgtggatagtccatagtcccgaggcttagcggaggattgcggattttctggaataggtatgaatgccggtagacaagcgatgaggcgcttctatatgtaccaggaaaacacgcggggcgatagccgaaattaacactggttgaagtggacgggataatttactcggaatatgattaaccaccgacttccgcataagcagttaattaagatcatgactgatatcacggcttgttcaattcctatgtaagatgttaggtgagtactgcatataaccaggaaagaaccaagctccagaaatgtacaacataaagtgtacaattcactgaagacttttatatgaaggatcctcgctagttagttacacttgtaagaatgtggtattatataacacgaggaatagagtttttttccaggcgagtgaggctccactaggagcgttgtaaccgacagcatgggacgcctaaatttacgtatcagacaatctatgatcctagacagcacattcgattattattgccgacagtattaccccctgacagaaggctttttcgtctccgtaccaataaggacccgagtgttatgcaagataatgtgccgaggcatacttactgttgagtccttggatggactgttcgccaaatggagtagtttattttcgcgtaatttaaatctaattaaatggggttagcgctagataaagggctagaataagccctggatgatcccggtatataacatagggatcagaacacgctgtagagtaagcactgtgaagttactcttgcggtataggatgcagtatactgaagggattcctaacatataccctgtactaagacttgcaattgaaagtcgagaattgaagttgaaccctagtttttttctaaaattaaatgaaatttatcggtaagaataccagattaataccacgctaactatgcactaaaatatatgatgggcgaatcccaagatagactgttgtagattgggtagagaaacgtgctgtaaaggcgctaagcatgtgagtggacattgccgatacagacttgggaattttccgtgggtgatattttctagtttacttctttattgacaaatgtaaatgttctatgttcaagtgattcactgactcaatttccgaaagaaatagaaaataagtccaaagtttggccaggtttgaggcagggtgacgggaaactaaccctggaggctgagggaggatatagagtcagcactaggatatatcgagaggagctaagatcaattcggatatggcactgcaggtataaataaccaaaataaaccccctttcgatccattcggaggctgataattttcgttttcccgctatacattctactctttcgcaacactctgtagagctacctagcagatacaacttccaaatgacgtctactataccaggattagttgcaagggcaacagcagattcagatctcacgacgacggccatgtcaagtatcttcactgcccccgcctcatgctcggagtcgtggacattcgaaccagaggttgcaaacagtgtccaaaatggtctcctactgcaaaatgccgcggcgagcgacaatgctgatccggcgtgtttcccttctggatacaatcattatggaagagttcaagcatctcttgtctatagcccaggctattgtccaggtggatacacctcagccgagttagcggctcaaagttcgacaaccgctgccatctgctgtccctcgtaagtgaaaaacagcagatcctggttcccggcttaaatattaacttcgaggctctagtgccttctcctactacgaggaagcaagaggcgactctgagacattcgccggatgcctaagtcgtcttcctagtggatcaagtaccagtgtcaccgtccgccagaactcgacgagcacagaagtcagcggccccatcacgatgtgggcacaagcaatccaaatcgagctgcaagcttcggacctaagcctatttgtctccgccactacgacacccaccactacaacaacatcatccgacacctcatcagttccgaccagcagcgcaaccgcttcatcaacaccgaccagctcaacagccccaagcacggggtctagcggcatgtcgacaggagcaaagattggtgttggcgtcggtgtcggcgcaggaggtctcattatacttgtcgctctggtattctggctcttccgccggcgtcagaacaaccaaaagaagactctagcagatgcaccatcgtcattcggagggagccgcaccgcacctagcgagcttggtgcggacggtttcggtgcaagcccatcataccaacgcgggggatacgtaacaccaagcgagcttgggagcgagccggcgggatcaactagcaagaacgcgaacactactccttctgaactatacgcggcaccccccggtccaaagttcgtacatgaacttggtgcttagtttttttttttttttttcttttcttttgttctttcttttgttttcttgatttgcaaagtcagaattataccccctttctcgctcggctctcggcccctggcataagtctatggaactgggacatgaatggttttacgtgaatatgcgcatgctatttccattgaatactggagtcgatgagcggcggtatgaggatcttggcttgggcttatcaagtattatgccagtacatatacatggatggtctccctgcattatggggcttgtttggggacccatgatgtaaccactatacctcagctacatagttaatacattataatcaccattgcttattttctagtttttgtcttgaatgcttttagggatgagctagtgacctggaaattaaattagtgaacaaattacggagtaaagacatgtagagataactatttgatctcttttgtttacgctgtatagatctcagaccaaaagcggccatgagctatacctaaaatgggatgacaccatacctaataaggaaaagagaaggcggtggggcgtggagatatcgatccccgcggaggccagctctctcttcaaatgtgaattgacctggacataaattgccaaagctcctaagtcagagctccacacagatggcatcgcaaacatacagctcgtccgttcgagctggcctcaaaccatcaaaccccgctccccccaacttcgccgatccaaacttcgacccggccgagttcctcaatgactccctatcaccgcttactgtggcatcagcacaacctagcgcctctcggtcacccggatctgttcccctgacagagttatctgcgcaggtccaatccctcctctcccagattagcgcccaaaatatccgtctctcgagcacgttatcccaacttaccgacgaaatccttcgaagcggtggacgactggcctacgaagttgaagtcctacgaggcgagacaatcgggctatccgaaaccctaactgaagtcttacgcgacgatataacaaagttcgtcccggggccctcaccagaagacggacgcaaggccgaacaagaagaggatgctcccacgaacgaagatgagtcggcagaaacagaggacaagaacaaacccgccgccccaacagacccagaatacataacgaacctccgcacactgaaccaagtgagatcgcgcctagaagacgtcgtacagaccttcggcgacgcaatgagctggccgctgcccccatccgagatctcattctcgtcatccttcatctccgtctcaggaccagacctcggccccgaaggccaagaccgcgaggaaaagggccaagaaatgatgaagaagctacgcgcagaagtgactgagctactcgacagtgaaggcggaggatacgccggactggatgctgccaatcgccgcgttgaagccctacggacgctggcgattgtgtggaatgcatcggccgaggaaaaagcccgtaatcggttcgtggatagcctggcgaatatcgtggaggaccgacggcgcaccttggaccagcagcaggcagatcagaaccagcgaggccagtccaagtccagatttgaggctcggcgggatagtgacagtggggcaccggctggtgggctgtttcggaatttacagcgtttgagagaggaaatatatttggagtgaaagaatgggttgttcatatatggtcctgggtgtctgttgagctggttctctacattgatacttggtcttcgctgtatagtattttgcatcttttacgacaatcttgcattttctggtctccataactccctgtctgtatatggctgtttgcactgctctttgcgggatcgccttccatatccgtcgagttaaagttgacgcaggtcattacgtagtcgtgaccagcctcgatatacataaactcgaccttttggataggagcgacgtcagttgctgttatgaacttagggctattaactacactatggggttgagcgtaactgaagggaatatagtccacagactatacagatccttcgggaacatctatatacagagtagatgtagaaatatacagttatccaagacccatgaacgtctaatttaggtgaatgtgttccttacacgtggagacacacaatactattattctcatagccctagatatggttatgaatcatcatctacctgagggtccaaaggcccaccaggtgacgagctgacgaagtgacgggagtggcaccgggaacgttgcgccgatcgcagcctctctccctctcctccaaggtgattgcgtatgcggttcctgacctcttacaatgttccatattgctttacccagtatctgattcgacttatttttgcatgatggcgtcggaggacgcgccactacactttgaagataccaagtcgactccaatgctgtggcacgtcttccaccgtcggtcacgggcaaatcttaaaacaattggtttgtcggtgattgcattgttcttcttctttcttctgctccagtcttctccaacggtaaggattgctttctgctacacggacatactattgccagacctatgacaaagaagctgacctgcctagcgagttgaaccggacttttggacaaagtttccctctcgccatccttttccccagcgcccggaggatgcccaggtcatcctgaatcctcgtaccgatattaatgttaacgatacccttccccacgatctggacaaacccaacccgcgcttgcatgtcctagttccagcctcgcagggctcgcgcggagtttgccgaacgctcacgtcggctatgatccttggatacccaccgccgacattaatcggttacgaccatcaatctcccggagcgactgaggccgagcgcatggtggaccggatcacgcgcgcgcgcaactacctccgagacagcaagaccgtacacgaccgcgactttgtgctgatagtggatggcgcagacacctttttccaattgccgccgaaggtcctagtggagcggttccaggctatcataagggcgaacaaccgaaagctgcgggacaagtttggattcgcaaaagtggagggccaaaatgctggggctgcgcctgagatggtacagaaatacacccagcgcgttatttttggtgcaagcaagatatgctaccccgggttgctggacgaccccggctgtgcatccgtgcccgattcatctctacccccggatgtgtatggctggaagactgatgcctacccggatggatccctgaaccgaccccggtggttgaatcccggagcggtcattggtcaggctgcggacttgcgtctgatctacgatgaggtcctgcggcttgttgagatgcgcacgaacaagtctggagatcacatggccttgacacagatgtacggacggcaagaggtgatcagagaactggagcggcggcgaagagccaatgacttcaaagagttgctttaccggatggtaggcatctctgatgcagcaaatatcaccgggattacccttcggctggagacaggtcaccgttacgagtacggcattggcgtcgactacgagtcacaactcttcttcaaccagatcatgtcccgcaaggacgtcgagtgggtcaagtttggcaacattaccaagatgtccgcgttgcagatggaacatggcgtcccgcgcgaacaccgtatcctcctaccgcaggacattgcatcgctcccgaacccattcatccagtcgcgcttcgcaaaagaatcaacccagcgcccagtgtggaatgccacactagacaagctcccgaacccgcgcgagcgcaactggcacaatatttcgctaatgacgaatgtccactccgcctcggtcccggtaatcgcccgtctcaacggtgaccccaagctccgcaacgcctggtgggagaatatgtggtttttcccatggggacgcgcgctgctgcggaagtatgtccgcgactcacacggattcgatgcggcgcagtcgtcgctgctgggcgggcaggactggttggaggtgcgcggaggtcgaggtgggatctggaccgatgatgagaactgggtcaatctttctgagatgtgcaatggccaagaaagagatctctttgacgatgatctcgggccctggggtaaggaaaacggtgacccagatcatccggtttacaaccagtatggaagtctcattgctgggaaggaacaataactcgactaaagctggactttgagttattatccttcccttttactcactacattattctcgatggatcgatgggctgccgggttgttaagacttcccgttcagctcgccgtccggtggtcaccatccgcctgctctgcgctatacctccacatcgagtttcaagcttatcaggctctggactttaacgagttttggagtaaagatatcttttgtctttttcatgaccgcctgattgggtgagccactattcatgacctccttcgggatgacatggccggattcaccggagaattcggacttattcttatgtcgaagctgggattctttcgactgttatcacgaatagctgtacattaatgcgactggctttgcatgactgcgacgcaagagtctgttgtatgataccgtcatagatgggaccttggaaagggccggctgtttggtgatgctggtgtatatagaaagcaacagaatgaacaagtaaagtattgtcgttcgcatctggactaatcactcatgtaatatctccaccggtttagatacttgatcatttcacagaatcttgaaacggccagagcttttcccatatcgctctctcttcttcatttgctgactcccgagtcagaaaagctgatcacctgttaaactgacaggtgatcggcttttcgtcaacggcggggagtggtgagcctgcgatgcggaatatcctatattatatcaagacggtcaccctttctataacttccttcatactcacgcgaagaatcattattaaattagcgcactcttctaccatttcttaggtcagtagagagtaagcattacatagtatagctatctaacttattctcaaaatccgaatctaacgttaaattaggagggtgccatagagcaagcggcaccgtcaagtttacacgcatcattactacccgtctactatccactcatgtgcctaatagatatttgactgaaagtatgaccctcactgtcagatataccatcttgctcatagtcttccggtttacatcggtgttcagcttgaaatagcaaccagtaccgcagaccttccgctgtcttccacgtggaatacggaatccgcttttttgggatcgtcactacgatcagaagcggacaggatcgaggcgtgcctatgaaagtaggcaagttttccgacgatctcctggagatgattttgatagttcaagtccagtcgggaccactaatagaaggcgagaataagcatgcatcttatcgtaactggtggatgtctgctcacttcgctttctccattgagttgaagaaaatgaaattggctgttgtcggtagaaagaccgaaaactgaagagtcaagcttaccctcagcccgacgttgcgtatgaatcatgcctgaataaagggttagttacgatggcagacatgacgagaaatcacttactcatatacgcaagagtctggcgcacgccgtcagcagattggccatgctctgtttcgaggatgaccatgttgatggccacgctttctttccctttcttcgcgtccgggccataccaaagaaaccaatcaggggtcccttggaggcaatgcactacttcattgtagacaattgggccgaatagaaatgggcacttggatgagatggggattggggttgaattaggagactctgggtccgggggcgtagcatggacagcatcaagtagaatacctaggcgaattttcacagccatctcaggtcttccatctgatctagaaatggcagcgtcgatcattttcaggacgatttctagacattaatagctatcttgccaagcgtttttcaatttggacttactgcagtggtctgcaagctcaaatggagcccgaagctgtgcccagtccgtgttatctgccctggtgaggtggaagatgcgctcaacatccgggaatgagaggacttcgactgaaagtttaggataccgaagtacctcttgtgtcgttatagacgccatgtcagaaaacagaagggtggtgtcctaagaatggcagaggtaacacaatgaccgtgatttactgctgtgggagaagtgagagagaagtgagagagaagtgagagagaagtgagaggagaaaaaagtgcgaggggagaaaagagcgagaagagagaacgcaaacatgaggtagtggcctaccagtaagtctttcctattttcctaacgggcttatttagactattcgatctacatatacaacatatacaacatagaaatgtgctctcttacggaataatagatagaattgaagtcattgccaatgtattatccatagatttgctatttgccaacgtttactcgatagaacacatatcccagtcgttgatccccacagcgtcagattcctgagcgtgaagctgtccagatttattcgagcgaggataagccatgacggctttctcgaagaagtagaccagcattcccagaaccttctcacagtcccgactgcagcgggccatgactggatgaacgctccactagtcaaatgttaacgaggcagtcagacatgtataatataaacgtactcacattggagtcatgagaaatcttcaaaaaccagaagtctttatcatcggtcactagcccatagatcgtgcaatcatttttctttaaatcctttcgacgcctgtgaacgcagccttggaacgatttagctccctaatatgcaatgacagaaatattataggacacttacccatagatgctagggtttgggctatacccttttgcacttcgccaggtttagttctaaccacagcagcaatcagcgcgagatcctccatatcgccgtaccagatcccatagtctagttctccaaccaatgtgtgcttctttttatccaaaagcacaggaccgtagctccatttgtgtttgatcttgatgccgaggaaccgagcagcctcagggagatcagacagaacgatatcacgagcgagaacaaggaggctggaggtaaaggtagaatgtggataggctgcagatgcaggaacctcacgatcaaatttcgataaatccaagtaagcgaaatgagatgttacctctcttgtcagttggctaggtataggaacaggaggcacagtcctgagctcattgtcattgacaacgtactccagattgcagatgacctcgatgtttttaatgagcagagatgtatttgtgagcatggttttggatgtgattctgtagatgaaggattttgatactatatggtgatggtttgtgtatgtgcccaggtatgatcatataatgactgcttgacccggcgctttaaatagaaagctaaattgcctcatccacggctagaaggtctttgacggatagtgacattgagaataactctattgtttctaattttggtataggtcttccatggttgtaggtcaggatatagcataccaagatctaggcctagatacatacatagagtccaaaaaggcctaattgattagttactagccaaagcgctacgtataatagcttgagatgggtaattccaggcaaatataatgctcggttgatcgtggatgtacaacaaaagacagtagtttgaagaagcacactggtcccttttttggttctagatatcaaacatctatgatacaacatccgacttctcaccctttcacgttttcataatccgccgtaagggtttccttgataatagccaaaatagccttaacatcttcatcagacagtctgagctcccgttcttcaataacaccgtccatcaataccaccgcagtgtaatcatcctcctcggcctctccctccccttccccatccacttccattgattcctctccattagcgccttcctctctagcttcctcagtagcaggattgccgctcagtcccaccccgagatttagaatcataacgacctcggctttggtcagtccgtatggctgtagacgggctactaattctcggagggctgtgtccatgggtgttatttctgcggaggggattggtggcggcatggaattagtatccgcctctgggtttgctgaatttgaggttcgcagcgtgccagtcattgcggcttgcgactgtgttttcgactgggaggaggaagggcggggtgtgtagcgggggtatcgtaggaggtggggggatagacggcttgcatagttgtgaatctgggagtttatcagccgttttttcttctatcgttggtctcttggtgtctggtttgcggtcgactgcgcttcacggtcgggctcatggtgtagttgaattaggccataacaccctgtataccgatgagaaggacagcatagggttgctcacttctttgaccactgtattatggtctctgagatctggacttggtgcccagttccccgaatttggcggtggtcggcggggtggattggaggttagataggccaggacctcaacattggtcaggacggcggtttgagggtcaatgatctagatcattgtgttaggagaaatcccgagcttcaagtgaaatagaacataccctcattttgtgtgttgaatgtggcaagatagactggcgcaactgggtgattggactgagaaaggaaaattgttcgaactgccggcagaaactgggcggtgtctttatctacctgcatatctcgaagtatacgaggcaaagcaacggagatgagacggaaacatacatatggagttagttgggactacattatgcgatacatagcctacaggtttacgatccagttgtgaagtatgaacagattattccagctaaaactgtactgccttgttcctaacgagcaccctctgcgccagtgaaagaccggtagatcaacctcaaaatgctccaaaacatgcgagcaacaggaagattgcaaaaaaaaaagaacagaaatgaaaaagtgtgatatcatacagatcccaggaaagccatccggtcacattgcacaaacttttgaaaacatacgcttactctcccttggacttcttcttcttcttcttctcatcctcgtcttcggaacgcttgcgcttcttgccatcgtccttgctagccttcttggcatccttcttggacttcttcaagtccttcttgctgattgaagtgggattgcccgctttatcaaaagtgatctcgccacgctcgagcttccgctcgtatcgcttgacgctgagaccagccttagcagccaattcctcaatgtcgctcttcttggacttcttcttgggtgcctcatcctcggactcatcagaatcctcagcctccttatcagagtcggcatcggccatctcctcatcctcaacctcctctacaagcttcttcttctccttcttggacttctgaacagcggcaggctcctcggaggccaaggcatcagcatcaggattgtacttgcgggcctccttcaagtcgaacttctcggcctgaacaccgttgggagcaatggccacaccacggggcttaatgggcttgccctccataccagcaagcttgcgctcaaggttgaagcgggcctcggtaccgagagcacatttctcctcctcggtggcatcgtcagcccactcggtgagggagtcgacacggataccaagagaggccttggcggcgaggatacgggccatctttcccttgttgcggccggtggcctggccgatcaaagaagcgtggtagatcagaccgtacttgggagtatcgtgcttagtcttgagggcacggaaaagggccttctcggcacccagaatctggatggtactggcggggctcttagacaagctggtaagggaaccagcgtgggcaataagacgggcaccaacaagatcaccgacaagggcagtcaaattgggtgcgatggcgttcatgcgggaagtaaggtagctagcaagttgggagcggtactcgtagaagccaacgacctgctcggcaagagcctggatgttctccagatcctcggggctgatctcggtacccatggagcggtcggcagcagccttgacggcaccctcgatctcctcggggaggatctcagcaagatcagcggagtcccagttggagcgcatacccatcttcagaacgagcttggcgtaggcaatgttgtcgttgaggatcttagccagctcggggaagtgccatccgtaccattccttaacacgcatagcgtaggtgttcagctccttgtcaagatcatcgagaagaccaatggcctggacgatcatagtatcgatcttgtcgggcgagaacttgagcttgtgacgggcgagagagtgggacagaccaagggacatggtagacatatcactgggggcaagaccgggaatgagggttgtgaggtgctcacgaatggcacggaagatatcgttggtggtggagtcagcaatcaattggatgtcaagaccgggaagcttgctgatggagtttcctattcacgatcacagtcagcatacatcccgtaggaagaacctttagaagattgacctaccgagcttggtatcggcaacggcgagggacaccttcttctcatccttgatgctgtcaagaagcgaggccaggcggggggtgaccttgccctccatgatggaggcagcctcctccagagctgaagcagcgctgtcaaacttctggaagctcttcagcttaagactaaagaggttttgttagtgccattgtcgccgataacaaaatttttgcgactcttcagagttggttcattcccactcaaatttttttatttggtaggattggaagacacaattgacgtacagattggagacaccctccgcagtagaggcctcctcggcgatatcatcacgcttgaggagcttcttgtccttggccttcagcagggcatagcccgcgctggtctcagtgaggatgaaaagcgtcatggtgcgcggccacggcgtttataatcgaaaaagaacagaaaagaataaacaagtcaaagcgaacgataaaccgagccgaggaaatgtcgaaaaaaataattagcgtagggcgtgtcggccaccggtgtcgttggagaaattgaatctaaatttgcacggaagaaaaaaagttgaaaagcgggtgccacgagtggcttagccgtgtggctaggtgcatgactaagccatatgcgtgtcctggacggatagagctacagctgggtctctccaatcatcttctccacattcaccatggagggcctattctttaatattaacggcgggtatgtggtctatatctttgcttggtccgaatagcgcccgttgttgactctcttagatacgttgagggcattgttcgcggctatcggaacagcctgttgaccggccagaactattccaacctcattcaatgcgagacaattgacggtacgcttcattgattccgctgactctgtcgtagaatataccactgcatattgattctgacaatctcgtccaatagatgtcaagcttcagcttgctccctcatatggcgacgtccttgcctctctttcccccaacccctccacgtccgatctggcgagccgcatgaccgataaactggtggctgaattcaagtacctggtcgcacaagcgacaggctcatctgccaagtttctcgaatatatgacatacggatatatgatcgacaacattgccctgttgatcacaggcactctgcatgaacgagacacccgggaacttttggagcgatgccacccactgggatggtttgagacacttcctgtgctgtgtgttgcgacaaatatcgaggaactgtacaactcggtactgatcgagacgccactggccgcctacttcaagggcagtctgagccaccaggacttagacgagctgaacatcgagatcgttcgcaacaccctctacaagaactacttggaggacttttacaacttcatcaatacccacccagacttcagcgggacaccaacacaggatgtcatggcggagattctgcagttcgaggcggaccgccgcgctatcaatattactctcaactcctttggcaccgagctgtccaagctcgagcggaggaaattgtacccggagttcggcaagctctacccagagggcagcctcatgctttcccgcgcagaggatgtcgagggtgtggcattggctgtaagcgctgtggccgattacaaagcattcttcgatgctgtgggcatgagccaaggcggtggcggtctcggtggtatgggcggaggtccggcagacgggaagagtttagaagatcttttctatcaaaaggagatggatatgtctaagctggttttcacccgtcaattcaccccagctgtggtgtacgcctggatgaagctgaaggagcaggtaagcctcttagaatcaatctctctgattttaagagtatgaaactaatatctcccaggaaattcgcaacattacctggatagcggaatgcattgctcagaaccagaaggagagaatcggaaacttcatctccgttttctaaaatcgactcgggcactctgtgattttctgttttcctgcctctttgtacttacccatctccctggctggcattttgctttggttgccaaccgcttttcgttgtatcgagtacccagtttgttctttaacgtgagcgcatcgacctcttttccttgatcgggagaatccggtcatctttaatttcggctgtgttgctttttttcctcattcgtatgaggcgtttggcatgtgcttgaccttatccttgtagcatagaagaacaaaatacagatatttattttgttggtatacggcgggctttcctacttgaatagatgggatgctcaagtttaataatacttgccagtccagcgcagtaagccctaattatgctagtaagagatccgttatggatatgtataaaggtctccgattaaaccctttttgcgatagacagtcctgcaagtatcgctcttgccgcaatgaagaagaatacacttgccaccatcattgcacccgaaaagacctgtaacccccaatacgtcccgttttgtctactcaagatggctccagcaatgggacttcctgtgagcgatgcaatactgatgcaagtaaataaaacgccctgacgaacaccaatcttggtcacgtcgggcgagatctggcctagcagggccggtaccataccgacaaatgcacccgatgcaaatccatatagcatgctaaatacaatatagatggccgcactgcctggggcaagaagggtacctggaagccataaggctaggatcacaatggcggataatgagcacatggcaatcatgacgttgaatcggcctagtttgtctcctaggtagcctggtaggattcgaccagggagactgcagactaggttagcacaatggcccttctcgtcaagtcaagatagacagtagtaatacttacctggcagcattaagtatagttgacaagtacccggctaggtcgccgttgacaccgtcctcctgagcttcgacgacaatgtaactgattggcacgaacatggcgaagaatccacagcaggatgccagcacaagcaagacaaacggtagctcggaaaatggactcgtataatcattcagtttcactggccgtggaacattccttattctcgatcggacggtcaagttggcagtgaccaggagtgtgaggatgatgaatccagagatacgcagtgaccatccgaacccaatactaggcaaaagtcgagataacatgcttgggaatacaacgccacccagtgatgagccgctggaaactattccaaaggccaaggcacgtcgtttctcgaaccatgtcgcggtacaggagagtgcggacaaaaagacaaagcttgcaccaagaggactgcagattccctgggctagcaagaattggtagtactccgtcgatatggagatcatcataataccaaagacgtgaagacatgttccaataagaagaagccattttgggccataattatcgaatacctgaagaaggttaacatgtatacctccaggcatgatggggctagactcactcttccaatgacaattccagtcgcaaagaatacaaatggctccaaagataaaatccaggagatgctggacgctgaataggactgtaattgattattctggtagtgctcttggaaaatgccaatggctggagcgaagtgtgtcaggttatcggtggcataagaaataggtatgggaggactcaccattcacccagccaaaagcgcaaaaaaggcagcaccatgctccaaagacgaccgtccaagcaggaagtccttgatccaactgtccaactgcttcctcctcatctgagacggccaccgtggttttcgattctatgggtgccatgtctagaggaaatctggatgatgagatgaggaattccaacggatgatcgcagaagcaagggcgagagaaaagaaaaagacaagcaaaacctctttccaacctttgatgtcaaggaaagacataactagatcatacatatccatgtaagaacagagagtcggagagatcccacagctccccgaaaaatgacactaaaaagaaagtacagaccgaagttacatcgggaccaatcaagtccagattagacagacttaggtgtacagttatagtttagcttgaggaataaaagataagattgacgatctctccttatgatatcataggatacatactgtactccgcatagatagttgcctcctaaacgggctatctcaagccaatagattctgcagaatatattcgtctctttgcaataatagattaatgattatagttttcttcaaggatgatagctgaagtgaatgtgtattagggcatggcacggcccggagaatcgctgcggatccaaatcgatataacccactactactctagtatctacatagaaaatgaggccaaaccctatgatagattcatcggtaaagtgtttagatagatcatggtagatatagagaaattggtaggcgagggtgaaataactagctcgatcatcggccactctaggtttatcatcgtcaatgttgtcttcgccgcgcgacttcctcgacgagtggaagttataaatatggcaggcacgttcgggttccatatccttagatcgtcataaaatgatcaggcaatctctaaatagcttcaattgacagaccagataaattgatcgaatgaatcatcataaattgattgtgaagcgccagatcgatcttgaacaagaaagactacattcaactgaataaggaagatggagaaagaaagaagaagcaagttgcaaagtggcagcggccagttgatatagctgaccactttgcaatgttgcaaccctcggaccttcttggtaaaccctatgcagtttatagacctctctgtggcattcatttccctctagtgttgcgggccacaagattcgggatacaaagaacttgtgcaaggattccagcattgttttgctacaaaacaaacctgcaatcttctagaacgatctgctacctcagtatataaatgtcatccctccactctacttccaagtttgaccttcaactatatctccttaattaacatatcttccaccaacctcaaccctcaagtgtcgacccctcatatatcatctatcaccttacatttccaggtaataccctgctcgacatgccacaagttataagaaccaacaaatcgattaggtagaggctctactcccgtgactcgtcatcacctctgtggtgcatcatgctaatctcgactgtctctctagatccatgccggtattataggccatcgacagaaggtgctttcctgtctctcctgggctcggtttttctggttgaataaaacggggacgtgtggtgttcccttagacgccgatgatgatgaagacgtcgggtttgattgggactccaagtctgtgggtgtggttgatgacttgaccgctgggatagacacttttgagaaggataaccgtcattcccactgtctgaggagtccgcatgtggcacaggtgagtcgttcttgtgtcgatcctgtttcggtgccgatctgctgacctgatgggcatttcgtgtcttaaagtgatgatgagacatccttatatagttatatcctatatatgtatggcaagcctccacatactattcgaaagggtctatactacgaacagcacctatggccagttaagaaagttatgtatgctctacacaatgccgccaacgagggagatgaaagcagagctgcgagaataagtgagtgaactacaaaaggaaggggtagaaggtgtggctaaccgtaactacatatagagaccgtgtgactttgtcttatactcaacgaacaactgcattaggatctatcgacgtacagacaagacaggactaaggagacatggcggtacaagtgatggtgttgaagatcatcgaagatttgcagttgcgaatggcatacacccgaaggactgtaagcctggattgcgattcagcagggctaggctatgcatttcaatttatcaactggcacattcctctcagcggtctttcgcttgctcggctactctcagaatgtgagagcaatgaagttcaccgaagttcaggagctctcagttgcctagtgatgaacatggtgcgcagtattttgccatgggaggtacacgggtatactgtgcattgggctttcaaagcacttatgatgagacacgagaaagcatccatctttatcatcatatgatgaactcgagcaaatgaatattccgaatatatgactttccgcgtatcatttattctagctgcgcaaattccgctagtcgcttagtatgttgtagttagtgttcacgtccacggatggtaggaaatatgcaccctgcaataataacctgccaatgacggctcacggtcccatatgcggccaagggaactgttggttagtatctttgtccagtattttcttttagaccaatatgacacgacccgggatatcaatactgtctggtagtagtgactccacgttgctctctcaattcgtgaaagtgactggttgactgcactcttcggatgtttaggggtccatgaaatcatgtactctgaatgcaataggtgagtagcaaaatggaaagggaaagggttcgagtgctagacaatacccgttgtaatatgcaaggatagagactgatcaatcaagcacagaccgacatgcatgagcttcaatattggaaagtcttacgtctccatgaagtatacagaccagccacattgatagtctagtcccagaccggcgattacatgcatgctgaaaaagaaattccccatttcgattcaacattcattgttcatatgtgcagatggcaaagggtgtggcagaggtagatagtatcacaggaaattcgaaaaagcaagaaaagccagccaaagccagatgagagcacgcgacaggaaaaaaagaaatgacagaaataccagaacaaatccagtgtaccaagtctactgcgagcctggatctatggcaaggggaattgaggttgtgggggtcgtagagaaaacgtggaaattttaggatatcggagaaaaggaaaaaaaaagtttaggcagcgatcagtcatactggaagagaacactgatactttcaccatggtgcacacggcggatggcctgggtatacgtcagtaaatgttcggaatagccggatgtatggaactcacctcgccgaaaacgtggccgacttccagaacctccagttttgggcaacggcgcaagtgctcaacttgatccacgctgttggtcacaacaaccttgtcaagagcactggcgttgatacgctcgatagcgtcgccgctcaagataccatgggtgagaagggcatatacctgagatgcgccttctttcttgagtaacttggcagcacgagtaatcgtattcgaggtatccgccagatcatcaatcagaatagttatccgatcacggacatcgccgaccaacatcatggtggcattctggcggtcggtgattttggtggggcggcgctcctagaaattgttagagtaacaggaaaattgaagagctcaatttgcctaccttgtggatcagggcaaactccatgcccatttgatcagcgattgccgtagcgcgcttggcacctccagcatcggggctgacaatgacagcctgcttgtaatttgggatattgtgctgaatatagctcttcagaagaggtcggccgtataggttgtcgacggggatatcaaagaatccctggtactgcgggtcgtgcaaatccatggtgatgatgtgatcggcgccggcgcaggtgagcaggtccgcaaccagtgtgccggcctgtgcaacccactgtttgtagccaggacgcggctggaaggaagtgatcttggaggaggtgctcgctgcgtcatcggtgccgttggtcaaagacttaagggaatctgtcgtatcgctgcgaggcaggccgttgccccgccgcttcacagggctgccagtgctgtcctcaatctgagctttggcaagacccttctggaggctttcaattccattcaccaagcccaggccttcagttcttccaccaggacccggggttgaaggggtgctctcgaatgtgtagccattgctgggtttgccccccacagatgccttgacgagaggagcaccggccttgtcataaggaatatcactctgacgagagtaagggaaaagagggagtacagcggtgacccgccgggccgaagcagtcttgcaggcggaaatggtgatgagaagctctagcaggtggtcgttgactttaccgccgccggattgaataatatagacatccttttcacggacggactcttggatttcaacccgagtctcccccacggcgaattttgagagcagaacctccgcgggaggaatgccgagaacattgcaaatgctctgagtcaactgagggtgggagttgcctccgatgacgacaagattgcgaaccatcgtgttggcttttgtggatatcgccaggactggagtaagagggatcaagaagaagggcgctcgatctgaaggaaatcaagtttggagggatcggatggagggggaagaaaatctggggggcgatctcggtgagcagtcaaggcagtaaaaaaaaataaagaaaaaacaaaagtatagggattcttgagatgaagaaaacaaatgctacctcatggcggaggaagaattgacacttcgagagacggagacatgaaaccaagaaaaaaaaaaaaccgaccatgtgagtcccgcgatgtgaaaaaagcctctttagagtggagcggacctgtggctggtgcctcaggtggcaaatgacccggattgggtaaagcgcatgtcgtgacgaggccccgcaaaaaaaggccctgcttctggacagacaggaacgcagtaaatggtcagcaggtttactgcttcggattctccatttgctcccggccatagatatacatgatttggttcaattcccccggtcgctttggaaatctcgaagaaaaagcaagaaaaaagaaacatattcatgactcctatgctccggtccccgagatggtatgtactaagaaaagagaaacataaaagagcttggcataagtctcccaccgtgcagtttgctccgagaatccgtcattcgcccgttccgacctccctataatataattagtatgacagttccggtatccgaaagcgggtttgaggctcacaagtcaagttgaactccgttgctcactccataatcctccagtgtaagctgatctttgaaagggcgttcgccctgacgtttgagaaggatttcgtggggttcacggccgattcgagctgccacttgggccttgaatagctctgcgtagaacattagcacactggtggcggtcaatagtaaaagggagacatactgatcggatctgaggcaagacaagggatcgcagctttagttcccaggcgatcattgacatggaccacgatcataggttctgaggattgtggagcgaccggtttcttcttttctttcttcgctttcttttccccgtcttcgcgcggcgcatctcgatcggcacgttgttggccccggtcgcggtcaccacctctcggtctatctccagatcggtcaccctctcggtcgcgtcgtggtgatcgtggtcggtctcggtatccgcgctctaatctgcgatcatcgccgcgggaatcgccagtgcggcttgtgtccttccatcgaaagcctccggtctttctagggcgctctctatcagtgtttccgcgcgggccaggagacctgcttcgcgatcggtcagccatgactatggatggaaatatggaagttgcgtgggtgcctgacaacccagatgtaatctaaacgaagctataaggcacgtgatgaaacgcagctgcccagtggagtacgctagtccaaatttgtattagcgtgtttattcacatcaagagctctcctgtctaaagtacgtttgaatttctccgcacttttgatctgcatcttgaatagacaggctataatgcaaattggcaactgattctggctctgttatttctttcacctgactcctccatacccaaaatgcgaggccgactagaagttcagcgtccctctccgacgaccgtctcctttaccgtatcgaatgcgccccagcagtcaagttcccccgccaaaataatattcggtctccaagtacttctgcgtacggttttatttttctgtgttattggtgtcggcatcgcgcgtgtccgaaacctcttcttccaagaagatgggagggtgataagctggccagccctctggtcgagcccgctcggatccaaactgtgtcgcttggtggattcatacaatccactgggaattgccgtggctggtgcattggtgatatacggtgttttcagaagaggtcatatcggtaggttgagaaggaagagttggctatattgctgttcatggctgattgttcgacagaggaatcgctcttggttattcgaggtttcggaatccagacctcgacatcttcctcgacatatctttctactgcctcaacgaggttcattcctacgacgcaaatccaggatattgtgattcacgaagccttcaagggcttcgaagtccgcttctatttggcggtcattgttgaaggcgagcttgatgccctagtggtcttcccggtatgtaatatcctcagcgttatactctcagacctaattttgcgactagcacatgttgcccaggcgagagatcttagagcaggtttggagaggttctcgacggtgtctttacgatgcgaagtcatgacatacccacagtctcttgcctcaagaaatttttgctcgtgcaaaagcctaccttgctcaagcccgaggctcgatgctttatcaattatatacagcgagattcattccgatgccgcttgtgcaccctccatccttgctagtcttcgctgctttgtgagaagtcccttggcattttgaacttccacggtctccatcttacccttctggtcgacacggatgtatttcccgccaacaacagtatcgtttccaccacaccagaccttggcacctctgtgtcctcttttggaataacccgccttttgccactgtttgtcaagattttccacgttctggtcaccctggctgacagtcaagtctagcagagcacccgctagaatctcatctatctttcgctttctccaaacggcccacaaactttcaacggtaccccgcagcccgaatttgctatcacccttggcggttcccttgcagtttgcagcattgtcaccagcatagacccagttcaaggaatcctggcgactgtcggaattcagatcggggaaaatgcagtcccaaagcaccagcggagcatcatcagccattgcatatattggcttttgtggattcttggtaatgtccagcagttcagggacgatagatggggactcgaatccctgtccgactaggaacagaattgcaaccatgtggcgcacctggtgccacaagaaggcagaaccgtggaggttaaacgagtagacctgagggatactttgagaaaccgtattgggagtcgtcaaatccggttcgggcacacaaccctctttggcctggaatccaggttggccaacataccccacggggttgaccttgggattgacggcttcgatactagagtgaaggataatgcgttcgaaattatcaatctgcttgttggtgtccaacttgcagaaattccggaagtcatgcataccctcgaaatgcttagctgcctcgcgcatagcctcaatgtcgagccagccctcacggaactcagcacgcgggccattgccgttctctgcgcggttctggaacccaaggggcccgggtgtgggagcgaacgcggggttggtgaagaagtacttgtaccgacgttcacggcaggagaagcgggcatcgaaaccaggcggcgggttaggacaccaagccaggacccggatgtcttccggaagcaccctgtttagaacattgatatagttcatctcatcggctacatcatcccactccttttcagtagatcccgagtcaacgcgcatcgcatcctcgccctcggtgggagtcttgggcatgggtcgttgactgcggacccgcagtccaataacctgcccaaaagcgctcacgcccttatcggtacgacctgctttggagtaatcgcatccatcccaataaaggtggtaggggcgcatggggacgcgctcccctctttcggtcggctcaagatcagaggtggtgccgggggagatgagttttgtacgccgcaatgccttccacataatctcttcaacggtaggcagaggcgtggtattgccgtttgtatgttcgagcccattgtatgcctgtcccagatatgcgaacttgagcgcaataaaccgcgttgtgtatttggaggggtcgaagctgcgctcgggtcttggaggtttcggggctttgacaagccgcgtcggcgcaagcactggggtactgtcgctatcttgaggagagtgtggtcgcttcgtagaaggattgaagggctcggtaagaggaatcgcagcctcgtggacgtcggtagcgatgggcgcggaagaagagcagggtgtctgcaacgattcttcggttggcgctgtgaactctgtcgtcttagaggacagctggcgctctaactctgttatgcgcgcgatcaggctggaattactccaggccgagtagtcgggttggcccttgcttttagtgtcctccatggtttgggatgtgagagtgcgagattggcacaggtatcgtgcttgcctgagagcgtgctgtatgttgcaactcagtggaaagagtctagcagacactctccacataccacatcagcgactgagtcaaggattggattggtgcggacgtttaaccggcgggaatcgaaattgaaaaagttgcgcggaggcgctgtttggtgtatttttagtattgagtccctgtacgaaggtgtaattacatgcactttatggtcatagctgtatgtattcaatgtatatcactgtactatgataatttatctgtaaataaattactatatgggctttttaaatcattaataaggcaatataaagttttaataagcataaatgacatgaggttaggactagcgaattaatatatatataaatcaacaactgtgttggaacgccaagcaccgaacttgatcacccaaagtattcattctctgaaatcaaatacaagcggcgaaggtacttatatagactgtcctacattcacaactgagacaattctctgcaatacacttgttaattgaccggccgaagagtgcaagttgaccgatacctggacagttgcgcataaatcgaatcaacagccattccagcatggctgaggcagatcctcacacagacggtaacaaaccagtctccttacttctactcggagatgaaggatgtgggaaatcaacattcttagcgtgagtacctagtcatccgacggactgcagcctagaagctaatctcctgggctatatatatgacgttatatgggaacatgctaacatgattcagtcgcctaaagagtggaaggtcatccccatcagggacctctaataatgactcaaataccattgaactattacgagatagtgatcagcctttcatttacgacatccgattcgcaaaaaaaacattcactctagaacttaacgacacatccaacccaaaccagcattggacaagccttcgtcctgacttggtcgttctagcctatgatatctccaatcgagacacacttactgggctaaaggaggtaagtcaaatatataattggagtaattgtaaattggtgctggaatttgacactattgcttagtggcgaaatgatattacccgttacttccagtacggtcacggcgagcgccttccagtaatgatgctgggcctgaaaagggacctacggagggaaggcgagggaatcatctatccacaagaggtgagtgactatgaattggagtttcacgccttgaaaattgacagttatctaggcctatcgtattgcgcaggaacttgtttgcgatagatatgccgagtgttcggctgtcacaggcgagctgcttgcagagacgtttgaagatctcgctagattggcggcaatgacgaccactgcaaaaggtggccagactgagggcacttcttgcgttattctttgattatttcgtcgtccatgttcgcatatgcggctttctaatgttgaacttctttatttttctattcttagtagcctatgtttcagctagagagtatgctctatgcaaccactaagatattacagacagcagaccagattctaaataacaaataccatggagacaaccaggacagccaatacagatatcagtgagtgcctttctagcacttagaccgctaccgcgctgactaccaggcagggcgggtggaacggctgtcgtctgcgagctagcgatccaagtactagaaaggcttattgagagaaagagagatatactaatacccaaatatagacgaacaatgaagtctacagccaggcactacactacaaaacctactggatatgataccgagcacaaccttttcagattactagaatacacacagggaagaaccaaggtaacgattaagtccacctcgtgaattgacagcacagggctttcccccagaagcttcgtaaataaaagcaactggatctctttccctcataagcgccagtcaatgattggcaatggcaattcctccccgatgcaaaaacatggaaataaaaaaaaaaagtgctggtaagatgagaccactgaggcaaaagattgaaaggttcccggtgaaagctcgttttcttctgtttttcagtttcttttcgtttttttggagaattgcacacagggactaggatagacatgtcaagggaatttgagggagattgtaatccattgttgtgaatggagtagatggtgtataggagaaaacaagagcctttccttgattcccgtgcctcgaaggacccagaaaatcatcaatcatcccagatcacccaactttttattgtgatcaaacttcccccctctcaacgactatccttgtcaccgcggagcaatttaccacttagcctcaccagcggcgggctgagcctcagcccactcggtggtagcgggagcggagctggcagcccagtcaccaccctcggcatcccagctggtggcaccagcagtagcggtggcagcggaggcagcagcgaaggcagtgccggggttaccagcgccaggggcggaggcatcccagttctcaccagcgaagccggactcgacggcaccagcaccgatctcatcagcaccggggaccttagcctcatcggcgatctccttgttctcctcggcctcggggtcgcggtagaagtagagatcgacaacggtatcccactcggtctcgcgggtagcgagggtaccgcggagacggaggacctcacgggcgagcatccaccagacgagaccgatggcgtgacgacccttgttgttggtggggatggcaacatcgacgaagtcggtgggggagtcagtgtcgcaaagggcaatgacggggatgttgacgtaagaggcctccttgatggcctgggaatcagtgcggggatcggtcacgatgatgagacggggctccttgaaagaacgggtgatgtagttggtgaagttaccgggggtgaaacgaccggcaatggcggtagcaccggtgtgggaggcgaacttcaggacagcacgctgaccgtagggacgagcagagatgacacagacatcggcggggttgtcaatggcggcgatgatacgggcggccaggacgatcttctccctattgcagtgaaacatatatattagacactatattacagtcagaagtcacttggctgtcgcgcataccaggtcttgccaatgttcaggacgttgacaccgtcggcgcggagcttccagaggtaaggctccatgtgcacctgaaggttcttggaaccaaggtggcactgcgcggcaaggagcatctcaatgtcctgcgcggtagggttgaaaaccgggggaagctgggaaggggccatgttgggcgattgatggattgatgagttggaggatcaatcgtctggctcttgtcgtggtgatggagggaaaaagatcaaagccaagccgcaaaattgttgcactctcgcgattcgggagaatttcgcttgcgtgcgctagggctagggctccggggctgggcagttgattacataatattagtcttgattcctcgttcacgtgatactaggtgcctgagtcagcggacgtcctgactaggattagcgtaactagacctccggccgcaagatttcccgaccaaaggtcaatggaaaagagaagttgcttgtgacaatagagccatctactcgccagctacgcccaccatgcccccgcgcgtttcagtccagtcctctctgaaggcattgaccggtatgctacttgaaatccgtcataccaatcgttcaattacctgggtgctaaccaagacttgtttaggatcaacttacggatataccccgttgtctaattcgatcaacactactaccagagctgtgtccagcaaggttcaaattcgaaagaaacatgacccattcttgatggcccaggcgcgccagcgcaaggcagcgaacgtctcccgccagaaagtccttgcagaggaacggaactcctcggttggcgaccctgtgaagagccagccgacaccatttatcctagagatgacagcaatccaaaccaactcgcacatcccatcatctttggctggggatctcaactactacttgaagtcgaatgagctggatgccgctcttgacttctccaaggatttgacagcaccgcttaaaaaccctgatcgcaacacagccgatcctcaggttgagaaggaggcagtgaatttgcataatcaagagcataagaatgcccaagaagcaatcaaccggattgtgaacttgaacaacggaaacaccaaggaccgcgtgcgcctcaacattacaaagtgcatcgaaacattcgggcgacactacacagacttaaatctcccaccaaagccttcggctgtggtccatggatctgcccctgtgcatccggaacgcgcgccgcgcgtcggacccgatactggctctgcagaggtgcaagccgcgatcctgaccgtgaaaatcatgaacctctcccgacacctcgagactgccaacaaggacaaacacaacaagcgcaacatgcagctactagtccacaagcgccagaagctgctacaatatgtccgcaagaaggaacgcggaggtccacggtggcagaacctgatggggacattgggattgtctgacgctgcgtggaagggagaaattgctctatgaagggctttgtttaataagaggtcttttgtgtgtctgtaccattctcttcttttgtgattggctggctttgaaaaaagtatcagcatgttaccttgtatcatctatctaggagctagcgagggctacttgttggtctatgtctctatttctatgtttcgcccgcagagtatctgtacaaatagcattgtttcttttcccacatccattctcgtgttgaaatcatctgaagtagccaacttgctattgcagcataagttctagaatgtattaagtttcctctaaatgatcagcggtattctcatatgagatggcagtatctcgattatgtaggctatttattggctatagatgtttcattttgtattactatcggaatgatacagacgtgtgtatttcacttctggtctttagtgctaacttggctaataattatctttttgatctttgctatagttttaggaaacaattttagtatccagtgatataattatcgacgttgaacatatatgtacatagttacctctaactactagtatttacgtactccattgaatatacgtaactaagagatctcaacagtgtagttagttatcgcatcttaagaccatagctcagggaacgtcttgaagatgcaacgaaagttacaggaggaattgcgtttggaaaactcagtatggaaaattttattgttcgtgaaatagccagttaggacatgaggctggatggtcgagtaaggactactttttcagtgaaggcggtagcgctggaagtttattgtcaagtatgtgacgatcccaactacgtatatctctactcaacatggacggagggtaagatttaatggacgtgataccaatgcgggaaccaggttaatctatctgctgctgtagtcgccggacctgaatgagaagtttgtttttgccgagcttcaaagtatataagacgtaattggacctcctccatagatgatctattaagtaggtcagggagagagacgaaagcttttcctttgcccatttcctagattcttggaagccttcatctttcatctttcggaggccctcttggtcattgcctcatgttaccctctttccttgtatctactaagggcacgatagacttccgctcctctgtgtttcctctgttcatcaactgcgtagaacctctcagttcagtcgttccaacgtaaccgggtcttgtcatctagaagctaacaggcgatggcccacgatttcggtctccaacgtctctgaagtcgctcattagagaacccacgccacctaagttaacgttggtttcccgttgcctaattttgtcggggaactagacatcctcgagatcgacaaccataactttgccatcatcgcagctcgcattgtcgcagaacgataaattgtctactttttggtcccagtgttcagcaccatgctcatataatatcttgagagcttccataagccgggtttccaaatttttctcgtggaccttgatcttgttgtgagcgaggtcatagagagtttgacgatgactgttgtgatttatggtggaatagtccgttcaagttctaagcggtgtactgtgctacatcgtgaatgtagctgcttgacattttttcgcagtgatggcttggccgtctagatagaacgtctaatgatgtgtgagccggatcaagagatccacatcgcggctagaaatatatattttacctgggaggattgagggtcagggaaagggcatcaggcctgggtagtgtatagagtggaattaacaataacctagtgaaacaatgcgtgaaatcaaagaacaatgtcaataattggaacaattggaacaatagagtcccttgcgacagcctctatagagggacataccgcctagggacccggtattctgccgggtcgcgccttccaactccgaaaaagttatatgcgttggcgaccaccagacaatcgctggcgactgcgagacaaaccgctctttccttctaattttttggtcgcgtccaccgcattgtttacctatttaatcccctctcttccccccctctctctccttctcctcttctcctctccatcacccacaacattaccatccagagcattgcctttggatatctctcaccagagtcttttgtgatcgactctaccaatcagtcagtatttacatttgtaactagatagcctttggatatctctgactgactgatttcatttcaataagacttccctcactttccactcaccacaacctcgacaccaaccatcctcctcatcttgcgcatttcgccaagatgagactgcggtcgaaccacgttcttcggccagtttcggagtacgtcccacgccgccgtcgccagacgcggagtgcgtcggcacaggctgggacggaggccgcgacagagactgtgccagaggcacagtctgcaccagaccttgccgagcagtatgctgcagaacggcccgctccaaagcggaagccagttaagagagctggccggaagaaggtcagtcagaaaacaaatgtcacaattgttcattactaattcatgttcctagaaggccgcgcccaagggcaagaagaaggccgctcccaccgcggagcctgaagctgctgccggcaccgaagccgacccccaggaagaccccgttgcgctcattccgtctgtggagcaaccagacacccgtacgttgccccccagtcccacccaggctacccaggccacccaggctccccaggcttccccgacccccccggtcccccaggctccccaggctcctccccagcgcaagttcagagaacgagtcatgtcggcctttcggtatgggagagccagcgcactcctccaaagagagcctgagcgagccccttcccctccgcaaacgcccgtgatggagtatgcctggccgcctggccaagtttatgatagacttggccgaatcccctggtcacttccctggaccccaccatccccctggaggaactttcctcgcagatttcctggcgtcaatgccccggatgaatcccagctgacccccacggaagaacccactaggaaacggaaccgatcatccgaagatgatctttcgccttcgaaacgtcacaagttgaccctccaaaccccacctggcttcgaaaaccgtcctcgcggcagctctcgcagaacatatgcggatcgcgcgcgacgacgcgaagcggaaaggggaggacgaatcgatcgcaccatttaccgtttcccccaactcctggctcagcagggagaggatgcgaggtctggcagtttgacccccgtggcctctcaggcaagcgaagagaccgcacctcagggtaatcgcattgtcccgctatcctcattgccttctgcactcccaccgaatcagaaccaaaatcagaacagacctaattggcgccaatggatattcaattcagtgactggtatttggggacgaggcaatgcgcctcaaactgcagaggtcccacaaggtaggcgcccctcatatcatggcatatatttatagtggctaacatggtgattctagtggtcgaacctgaacatccaacgggcaatgactccgtcgcgacaccttcctcagcccccccttcttcctctgttgtggcgtcacgaaatttcgaatcgcccactccaagctcgcgcgttacagagccacaaaccgcaaactctcgtctgacagccagggcacgcgctccacaagtcggcacaagaaagaagtactcctacgatttggacccacaagggttcgacccagaactgctcgcgcgcatgcgcgccgggatgtcggatcctgcggacctcgaacctgtaacttcaatcgagcaagttcgtgcgctttacgataacgaatcgaaaaagcgcaagcgagaaacgtcacccgatgtcattccacaccctccaggatgtagctacgggtttgacccagattacttcatctacgatgacgatgattacgacgacgacttgcccacaggcgagcaggaactccaaggtaccccgaccaaacacgctacagtcagcgatgcaccggaagaggagcatgtctccaaacgtttgcgccaagatcccccaactcgacaggctacagtcagcgatgcgccggaagaggaggatgtctccaatcgtgtccgccaagataccccgactcaacaggctacagttatcgatgcgccggaagaggaggatgtctccaatcgtgtccgccaagataccccgactcaacaggctacagtcagcaatgcaccggaagaggagcatgtctctgacaatatccagctggaaagctccaacgaccaggtcacgtcggagcccattgagtattccgccgaggaactccgcaaggcccgtcagatcgcagaggctcgtcagaccgcagagcagtacaagccgaagacccccagtcgtcttcgcgcggcccatcgcttctcgagtagctgtaactcgtctattgaggtggaaaccgtccaacgtcgcaagatgagagaaacctcaatggctacggcatgccccactggcgatctaagccagatcgagtggcccgagactgaaacttggattgagacctttaactgggacgatcctaactttgagaaatatcagagaggatctttcgtccgcactgatctgtttcccactgaggaggcacattttgatgcttgtcacaaggagtttgctgaccttcttgctgctcggcgtgcagcttagtaaatctaacaaaaaaaaagacttgccagagagggaaccttcagaaatacctggaggtcgcatctccattgagcacccggttcccccctagggaacgaaatacaactacgagattccgaagagcaagcttctcggcctgctacttatcaaaaaaattgaaaaaattgaaaacaacgaaagaaaaagatggaagtcctccgggttccctggcccgcctttctaggctggggctagggctcccttggcccgccttgggtctctgatggaaccaggctggtgccggtttttgctggcccgccttggagctctgaactgggcttgggtcgagccttggaggaaatcctgtatacattctttcggcgttgtgactcgttggaccgccttggatgcatgggcctacgagtctacgtctttgtctttttcgtcttttgcgttttgcgctttgttcttcttgctatttagcgcatgtaatgagtgaatattagcgttgttaaggagcatttgaaaggattgcttagcttcccatacaagtcaacagattgtaaagactaggctcgtctagagtgacaccgagaaattaaacccaggatatggtattgatatagatatctattatgctattttctaacctagtcaaagcccttgaactcactatcgccattggcttcctccgccttgctagcttggtccaacaaccgctgttgctcgttcttagcacgaatctcctccagcatgcgctccgtttcaagagccttctgcttttgatcctctggcaattgctcccatctctccttctccttccgcgccttgttgaactccctcttcttgaactttttatcccgttcttcagtcttctgactccaagccacactctccgtagcacggcgcttgttaggaccctgctcagtgccttgtccattagcagcctccgccatagcctctttgcggcgcttttcttgctgcttgtccttgtacgtgtagttggaccaatcaagtttaatgcctagcgtccgatctccttcaaaggagcgggcttcgggcatcttcggcagcttgaggagtccccatgcctttccgagagcttcccagtccagatctgcaactcggaagatactgcttgcttggtgtttgctgtagctgcgcagccagctgacgaacgccttctggcccttgtcgtgcatagcgcgatcttttaacaccgctttgcggaccttgtctgtcgcggctgtggcctgttcgtccgtgaactcgggtaggttgtatggcgccacgggcgttttgcggatttccaggaacgagacgtagtcctcctcgcgacctgggtggatgaggacgatgctgaggcctcggcggcccgcacggccggcacgaccgcatctgtgaatgaatgttttggggtcggagggtgggtcgatctggactactagatcgacggagggaatgtctagaccgcgagcggcgacatcggtagtgaggaggatggagggcgttgtggaggtaatgaagcggttgaagttcttttggcggacgttggcttggtgtttcccgtgtagtgggactagcacatattcgtctcctaggattatgggtagtattgtggcgaggtagtcgacactggagcatgttgacacgaagaaaatggttttttgaggtgtgggctggacattggaaaggatgtgcttcagaatagcatatttgtgaagcggaggtgttgtcaagtaggtcatttgcagactgttcaatggttagatcggtcatttctgaatgggggaaaaattcaaaggacatacctcgctggagtgcgcttttcttcgacgccagctcctctgaccttgacggcaattttgacgggatttcgtagaccaagtcggacgatctgatcaacagcctcactgatactggcactgaacaatcctgtacgtcgctgcttgggtagccggcctaagatcttctgtaggtcgtccttgaacccaagatctagaagtctatcggcctcgtccaggacaagcatttcgaaagatgcctgagggcagtgaacgtgaggcgacgaaagtaactccaacaagcgtccgggtgtagagactaatacgttgggcgaatttttaaggaataactttagatcttctgccggagatgtcccgccgcccagaagaagttgtgggacgaccttcaatgtcgaggaagaggtcttcgcacgaggagcaccatcttcggcgggttttaaggctgcggccgacgctgggtggaactccaaaagggagagaagaacttggtgaatctgtgaggccaattctctgatataccgatattagcaacgagctctgcagacctggacttgcgcattacccaccttgtaggagaaatgacaatggctccaacatgatgcttcttgagaggctgatcaaggcgaagaagcttttccagaattgggatcaagaatgacagtgtctttccacttccagtgacagcttctaccaccacatctttgtgctgcataaacagaggaatggccgaggcttggactggagtcatgcgcgtgaagcccattgaggccacagcgtcgagggagcattctgacagcgggggcgtgagagcatcccacgctcttgaagatgacttgggaggcatttattaatctcaagagacaccgagtcgtcaaattgcttcacgagccgccatcgcaaagaaaaaaaaatatccgttatcgattagataccagacacgtgaccacggctgtggtcggaaaccgagatcgtgaatctgtttttctctcgacttagccttgcttcgtttactttacttttacatggtataacaagtgcttggtgatcgcatcatgtactggaatcctgccttgtgtctccagcttattcgtccataagtaacaataaagattcgtcacgtgccatcgaaccgcctatcattgctttgttagcaagcccattgatattttcgtggctcattcgtttgcgacaacgcagatatctgtacgcccaccttctggtgtccttcgagtcgtaccgattccttctttgaaattaaaggcgcccgacatgtcctggtcacaacccgtaccagaggcacctcgcgtgctgtcaccgaccccctccagatcggaccggtcagagacacccgacggatacatcgcaccgatgacaaggtctgcagcccgtcgccagcgtgagccagatggttcagccgaaagttctggctcagcgcgagaatcaagatctccctcggctcggcgcaaccgcccctcacaccccccnnnnnnnnnnnnnnnnnnnnnnnnnnnnnnnnnnnnnnnnnnnnnnnnnnnnnnnnnnnnnnnnnnnnnnnnnnnnnnnnnnnnnnnnnnnnnnnnnnnnnnnnnnnnnnnnnnnnnnnnnnnnnnnnnnnnnnnnnnnnnnnnnnnnnnnnnnnnnnnnnnnnnnnnnnnnnnnnnnnnnnnnnnnnnnnnnncccccatgatacccgcttcgccgccgcgctcggaaaagggtaccgactcgaacacccatctatccccaccaagcattaccgacgcgctgcgcgacttgtcaagatcaccatctcctctcggactgatccccctgcatgcacgctaccgcagtttcattcatcgccatgaaatcccgcgcaagctcttgcacgtgtcaatcgggttcttgactctgtcgttatacagccaaggcgtccaaacgctgcagattacaccagtgctctttaccgtactggtgcctattgccgcaacagacctgatccgccatcgcttcgagagggtcaacaaggtatatattcggtttatgggtgcgctcatgcgcgaaaccgaggtcaccggctacaacggcgtgatctggtatctcctcggagcgtacgtcgctctccgcttcttccccaaggatgtcggcgtcatgagcgtgctactccttagctggtgtgacaccgccgcctcgacattcggtcgtttgtacggccgctacaccccccgtctgcgtcccggaaagagcttggctggtactatggcagcctggttggtgggtgttgtcaccgccgctgctttctggggctggttcgtgccttacattggcgctttccccaatgacccagaagacgcttttatgttcacgggacgcttgaatctgctcccgaactgcgttcgcggccttctgggttgggagcctagtgattcggcggtcatcactggccctttgtctctaggcgtcatgagtttcgtctctggcgtcgttgccgctggcagcgagttcattgacatttggggctgggatgataacctgacgatccctgtgttgagtggagttggcctctggggtttccttaaggtctttgggtagatggataaatgatacactcctgattatttctcagcgcttgcacaatattccctgctctttttttaatgctatatctgggtgcttgacggttagtattcgggcatttttctcttttgctcctctacgttctggtattgtgctgcatcaagaattctattcttgtttagatagacactggtggaagccatgcacattttgatactcctcttcttttccgtttctattctttggatgtgtgttctgcatagctactttctgggacatggctttggtacgttttcggatatatgcatagggtattcttatttacaatttctgcgacatatgtacatggcatccagcaatccatcctcgagaagtcagctttcctgagtcttgatagaggtactcggcatgtttatccaacgccgtaggttaacaaaaaaatgcggttgctccacattgttgtatgcaaaagctccagacccgggaaaattcaaattgatgccatcgccaatccgccaaaacgagaagaagggtataagaaagatattaatcaaacgaggtcaagaaaactgacgcgtgggattcttttctttttggcaggctgagtctgtctgcgcgctgtgctcaggctatcggtagctgagccttcgcatggatcttgttcatgcggagacgggtcgatcgaccaaaagccgtcgtgcaatataatgttttccaagtgccctatggtcttatgcttcggcgttgtgctcgtcccctttgaagacttcttaggagaccaatttacctcattaatctcattgttttcgtatgtcttcaagttcaatggtaatgtatgttcgggctcgagttcgggcttgggatttgcttggctgcaagatcggggtggtctgatatcttcgacttcagaggaacgagtccgaacttttggtgcttgtggtgccttcttcgttggcggttgacgcaacgagcgagttgcggtgttttcctcgtcgattttcgatgacagagaaagggactcgatggctttttcgatgtgttcaaccctggccttttcttcacactgcaccttgggaatcttcttggtcttagataaagtcttcccggacagagaaggcagttccaagagtgctctggctgggaagtcctccgtgaaagtttcagattcacaaacgtcggagaccgagtagctaattttgagtcccatgcgtcgtgtcgggcgagacggagaataatcggtgttcatgtctagtgcgtcagattcttcaatatcaacctgaccagttcccaaagctgtgcgccttgatctaatgcgagactggtccgatatggggtgacgcttgatattggcagaaggagacaggttacacattgaagagaatgtatcaaggagaccatcgacttcccgagaaacgtagtgcatcgtcagtgaagacctctgcggaatatacatgctcggagaggaaaatatatcgtcttcctggtccacaattgttggcgaagaagacccagaattggccacaagtcgggaaagaggattctgagccgatgtagcggctttcaacaagtgtgtttgtttagttgttgacagttcggacctttctttcgtgagagttccgtatttcaggatactcccccgtttcattccagcatcaattggtccctttttcttgggaccggtgcgccgagtaccggtcttctttttcgccgcagcttcttcggctttcgcggctttttcagcctgttccctctcccaatttttgacgacctcaggaacacccagtcttacgacagtctcgaatatccagaccttctcgagggagaacggatcaaattgttttgtaatccgagtcttcgacggtgccggaggtggtgatccagcaactacctctgggtcatcctcttcctcagcttcctgtacactaacttcggacggcgggtttggttcctcggcaaggagatccagcccaacaatatctgccggtagcatatctagctgaagttctggcactgcatcagtgccgaaacttgatcgggttcgatacaccttttgcagaccaggtgggcaatcgggcacaaatgagaaaccaggcgacacgcctagaactggtctctggagacggagtctgtatgagacaagaggctcagccaacagtctgatcaatttccttgcccccgatcgataattccattcaaaatggtctgcggcaaatgttcggattgctagggggtcgatatctttgtcccaagcctgtacgagacgggttttcagaagtgccatctcttcatcaccggaaactttgggctgggcgtagtactcgagaatttgtcggtccggaaaagcgtctggaattcgaactgctgggtgtttcctcgtaaagtatccactctcattctcctcaagttcatattggagtctttctctccactcgttcaaccctgcatccacgtctgcttgcgacgcaagctcctgcagaagatcctcgccaaatccagccttggcaatctctgcagcgagcttgctgccgcatttcggaacaccagatggtaaatagtcccctccactgagcatagcgaataggatcattcccggtcggtcaaggggtatattggatggatgtccatcctgtcccattgcatagcatgtaacatgagttgctgaagagctgccgcttccgctctcttttgagaagttcataatagttaaagacgatccgaacatcaatgcgtcgacatcgttgctcatgacagcgtctacaatacctgcctgctgtaaccgtgcacattcggcctctgcctcgccgggtgcctcatgccacggaaacctgaatcgttcgatgaggtccttggaacgcttgatgatcggcgcactgccataactgcgagatgagactgctttgcctctcttaaaagcaggtttttgccgtccatcatagacaaaaagggggtggactggcaatgcaagtaacttcaataatcgataaaatagtgtgcgtagctctgggtttcttccgcctctacccgcttgaacttgaaagagccagatcgaaatgtcgactgcaatgcgaatcggtcttgctgtccgctcgaggtgcgtcactgccaacttcgccagagagatacgctctcctgggccaattgcattgatgagccttgaaaagttagtatttggattgaggaatctggagatacgaagtccggcttcttatgcgatggataaacaacgctttcactcggtgctcatagcgatatatatgttttccaccatgtaaaataaaataggatatatgacttaacttacccaggaatacccatgccgactgtaagcaatagaaatgggaagcagttcaagtgcccatgtggtgttagaagatgtacaatatgcagtggttttgcggagagaggaagttgtgaagtaaataaagacggcccgatgtagatccgttgcctaccaacgagcttcccccaaccatttgggccagcttatagatcttatttttactttgtctttgaatttaaaccgatggcattgaaacctcgacctgtgcgcaggtgaatcgaatatttgtcgctacgaaccctacgaactcctgttgctcccagaaaggggagcaacgcgcccaagctcatccaagcatgtcgagtgatacaccctcaatgggtgccagtaaacgcacatcagcaacttctggtctgcggaatatccagacagcgagacctgtttcccctcatacaccacaaccacattcgggaaacccctccttcgccagcagcacatcaccgggttccacctttcgaagcgaagacgatgcgatcatatttgagataggcgcacgatggctccgcgcaggctttgaaggaagcagcgcacctgtgtgtgtggttggctttggacctgaagactcgcggagagcgggggactaccgaggatggattcagggcagcagcggtgctggacggctagcgcagcccgtcgacatagaagagtggacacggacatatgaattgtggcggccagattctcgagaaattgatttgggcctggttgaggataagatcgagcgcgcgtttcgggagacatacaatcagttcctgttgacggatgcagggacatctcgcctggttcttgtcctgccgtctctcatgccacacccattgctgtcgtcattgctgtcgacgctctttagtcgatggcgcttcccgagtgctacccttctgtctagtgcgaccatgtcggccacggctgcgggattgcggtcggctttggtggttgaccttggctgggccgaaactacggcaacggcgatctacgaataccgcgagatgactacgaagagaacgacacggtctatgaagcatttgatgcaggaaatggggcttcttcttaccgggtttgcttccggaaaccagggtacggagactgtggataagatctctgttggattcgcgtactgtgaggaagttgttagtcggtttgcctggtgcaaatcgcaggcagaagaagatgaaaacttagatgaacccggcctgaaattgtcgattccttcgcccgcaaatcccgaggaagaatatatggacgtgccgttttcacgtctcgctgaacctaccgagaaggtgttattcgcaccaggtgtcgcagaacatgaattggacgacgaagaaaaatccttgcctttgcttgtctacaacacccttctctcactgtaccctgatgcacgaggaacttgcatgtcccgtattgtctttgtgggcggcggttctcgaattcctgggctacggcagcgggtccttaaagaagtctcgttcttgatcgatcgtcacggatggagtccaattcgaggcaaagcactagagcgacagcgacagagattggaggagctcagactttcggcccagaaagcatccaaccaacctgagattcctaagagcaatgtggaagcaccttccagcgatgacgaacccgccgacccctcgaaagaagtgcctgagattgatttcgtggaacaaaacctccgccgacaaaacaaagacatcccagtgcctatccaaggagtcttgcgcgaagttgaatctcttggtccatgggcaggtgcaagcctgacaaccagtctgaagatccgggggatggtagagatcgaacgagagaagttcttacaacacggactcgctggagctacaagagatattgaccatcctgttcctgatcgtcgatcgggcttgagatctggcggtgatcggtcgagttggacgcttgcaggctgggcatgaaaccatgtacatttttcaaaaacaatagataccccattggatttccgagccgttatttccctactgtttctctatatgaagcttcccaaataagatcgccgtgtttacgaggatctcggcatttaatcgcacccatcggttgaatgctggaccggattactttcaatctgaattattgggaggatgagattgtaaaagggagtggtggtaatgggggtagtttttgtcgaaattttagatgtctattatctgctgcacgcattgagggagtttgcatgtatagccaaattcaattctattatgtctgttttcggttgtgaattggccacaggtggctctcattcgcacagattgaggcaatgaatgccaaataagcgctacgcgtagggtccacgtagagatagatattgatccaatgcaagtatggttgcgcaccgtactatgaatctaaatagtgccaaactggtaggtagcccagttaacggcgggcccatcatcaggaccaaagatctggtagggaatacgaccccactcagggttattgataccatcgatccaatcctcggtctcgataacgaagcatccatacttgttaacatgggtggcaccggagtcaccaccatcagcctcgttgcgcttcgcctgcgaattcttagtggcgatggaaccgttctgtccactgcaggtgtagatctgcagcgcggcctggttggtagcgacgtcgaggctgatgccagtggagctggatgaggcactaaggaccgtggcgatcgagttagacgcgtatgttgagggccggtcgacgaggaagcacgtatcatagcctgtgcagccggcgccacagaggtcgtaggtcttctcgatgtccttgccaatgagtttgggactggtgaagtctagagctccttggtaggctttctcaacgtcgtgaatggtgccgttcgggattaagatgctgtctccaccaacgaatcgctgcgagaggggaagctgcaaggtggtatccttcaacacgttgggttctttgaacgcgttcaggttccagtatatgtggttagacagcatgatgggggtcttctctgtaagagagagagccaccagctttgaagtcaactggggaagacccttggggttggccggtgtcttctcggtagacacgctgaaagtagcatgggtaatgacgtctcctgggaacttctcaaagccttgatcgaacaaggtgaaggtgatagaggcatcgctgtgcgaagtgaccgtccagttgcgcatatcatatccggtgaagccaccatggagagtgtccacaccatcgttttcattctcaggaacgtggtacgtgttatcatcaatagtgaaggtaccgttcttgatacggttggcatagcgaccgacaaccgctccgaagaacgtgcgattggtttcactatcatgcaggtattccttggggtcatcgtagccaacgatcacatcttggacgttgccgttgcgatctggaactagcaaggaggtgagacgcgcaccatacggaatcagcttggcagtgatattctcagccttgatcgtataacttttgaagtgatcggagtttgagtcactagcaggcgagggaacagcctgagacggcgacggtgcagcattggccaaggcaggcagcccatacagggcggctgtcacataagacttgaaatgcattttgattcccaaaagagttgtaactgaaagaaacaagataaagacgaggaggagaaaccgaagcgtaattcggggacggcaaactgatgaacgtagccaaccgcggggtgcaggcatcttatgagaagctccgttcggatcgcaataaacattccccaatttgcgctaaactacctccgcatggctttgacgctagggggcggggacatggacagaaaccggggtaaaggttctagagagaccaggatttatccgaatgcaggtggtgtgatcgatatgcaggtcaaccattggactgttgggcaaagcggacgccagataatgagggggaagatctgagcccctattccggggtgttgggggatgtaacttaagggacgtgggtccagtcaagctcaagaggcgctctgccactgacggcacggaacaaatgcttcgctgagtccatgcggcaaaactccggtggagttcaaattgcatgttcaccgcccggagttgttagtcagcgtcctacccgtccacctttccaacttgggttagttcctgccgaggtaaccgtggaaggagcctctaaggttccaaggttcaatcacggggtaattccatttgatatgttgtttattcttaaggttggctcccaggaggaacttgccttaaccttatagacatcccagtcaggaatttatcaatgtcagccccgttctgagagttattctgctctcaggctcgggcgcactcacgggaagtagttggcgtccatctcacctagtatgtcgacgacagccttcgtggtataaatcttgacaggaatcaatccgtgagtgtgatatgttgtatattgtccagatcatctcatgctcagacaatttgagccccgggttgtgcctgttcattccctttgcaaatactagcaccttggcatagaaggggtcaaaaaagaatgtcctttcgtcagtcacactattttcaattccgccgtagccaaaacctcgtctatggtgatgtacgtgttttgcagtctcggcgtcgaactgggtgtagatgaagtataccttgtttgggccagccgctgccacgtatggagtatccggcgccacaacctgaaggccatatcctggcctttggtacgtagcagatattccccatggaaagttaatgagccactgagccctcgcatggtaggaaagcattcagaaacatggtgattaatggtagaaagagtatgtgcagtatagtcaccagttgaatatgtattgtgtctatttccgtgtgtccttctgcgtatgtttcttctctcaaataatttagcggtcagaggcacgtggtagataattactgtcccctccgacccggagtaccacgcctaccagctgcctcgtaaccgaagagcccgtgtgaccccaaattggaccccaatagtcatcctgcgcccgtgatcagccgcagaagtgttctgatcactgcgggccgacaattggctatccgcagtgggaccacacgcagtatgctggccctaatgacatcgatgataacgggttcaccatcgactttgggtttgctactctgtagacacctatgtacttgattctatctggaatccttggacttctatttccgttgataatagggacagaaaagaacacagaaattgagaccaagagccatcaaacatcagactcgaataaatatagtatacaagatactaccatcagtataccataccaactcatgtgaggcagagtaccggatgccatgactagtcggagggtgatgagtggcagcttcgacttcagtggggcttcctttctagtgcaggaacatcttcacccgggtgaaagttacacatataatcttatcccaccaactggatattgtcacagtggttccgatagggccgttgtgcagttcaccacacctcgtgctctagtattatgccgatgggacttcctttctagtgcaaggacatcttcacccgggtgaaagtcacaaatttagccttattccaccaaccagcatattatcacagtggctccgatagagtcgccttgtaacccgctacacctcgtgcttcagtattatgccggtggcatcctcgtaaaggcccgcagtatagtttccatccaaacagagcaaagtagaccccgcttggggtctatagtatgtaatgacaatgaggtttaggaatataataaggtcactacgatttcccatcattcctgtatttttttcactcaagcacttgataatctacaaacattcccagaacacacgttctttcatctctatctacaaggtaagatagcccttcgttgaagacttcgttatacattagatttaatgcatggccccagaattcagacaaaatggcaattgtggcgtgcaataactgtaccaagcacagagagtgttctgcctactcaggttcgaaaatgtactgcgaccggtgtgctgagaaacttgggttgaaaacagcgaaagttgaggcaacaaagacggaaaagaagaagtgacttactactactactgggtctatgttctggtcagtactattacgtctgatcgattattgattgctatgtatactaagtcttatcagaacatgattcagggcaatgattgacggtgttaggtgacttaagatatgaatgtgtctgttttctggtttggtcgttcaattgtttcaagattgactgaatgaactgtggctctgcatcgatgaaacggatgtcaatgtctgggctttgctagctttagatcagaatttcaaggatggagagtcgctcaagtttgtaatcttccagttcttgttttgctccataaggataagccatacatctcaaactgccaggctacgctaagattattcttggtgtagcatccagaagaccgctagatctacaaggtctctgactggtatagatcctgcgctaagtaaagaggtaaacagcgtccgacaaggtgatggcgagagaggcttgcttgactgggtacatggctaggcggactatgaacttggttgcatgtaccaactagacatgcaggtaagcccaatagttacctggccctccggtcaaaagaaaacgagtcaagatgcatcgcttcgaattttgtttaaacgactaatttcggtctatcactatgcggcaactcatctcactcgcctagtcagagataccacctgtagaaagtaggggatgtgggtatggttgatttactttgcagcgtaaatttcctttttccttccttccgttacatggtattgccatctttggaatatccccaagccctgtcaaattcattccaacctccagggggcgcgtcccacatggccaactcacgaaccactgtgtcgtagtatccatcgctgggcatgtttccctgacagacatttcctccaacagcgatgttgatgaggatcctgaactcactcatcttccttgtgccaggcggcttctcggccctcatgatgggcgtgccatcgatcaaccagaccaggcgcccgctgcccgttgtttcgtcctcatcccagataaaatcgtacctcacccctaccggcgagctaatgttggggatgggggtttcgagaacgcgatgcttattccagtcctcgccgttgaagttgccccaatgcagacaagtgtggttgacagcatcgccgttccacgcttccattatgtcgacttcgccatcctcaggccacttgaaggggtctttaggcagcagccaaaaggcaggccagatacctcgggccaccggcgccgtaatcctggccgatagacagccccgtggtcggctgagggtctggtgactcgacagtctggcgctggtaaacttctgggcagggtcgggattcccgtggttgatcagagcgcgcacgatcaccgcatcgccctggcttgaatggaatgagttatgcgggctgtcggtataattctgcgattcattgttgccccatccatgttggccctgttcgtgggcaaagttggcagataccggtacttgaggatttagattgggctgccagtagatctggggttgcgagtgctgttcctgataagctagtgggggcttgctagcggtcggaataggcggtgggggattgttgtacgacggtgctggctgagggttgtcgtgatggcttagttccgcccaagccttgtctgccttatcgataatgccctgaagggcctgtctgaatggcatgttgagtacgacctcggtatggatgttagggttgcacaagtagtgtacctaggcgccggagaaaacagtaagcaaagctgacgtcatgttgtggatatcccgaaaggatcgaattcctcaaaatcccctttcacaacctttcaacatcctacttggggaaatattgctcctttctgagactggaccgatctaatcagtggacacgttatgcctccatgggctagaccaagactcagatcgtatgaactaccacctgctaagtagttagtgcctcaggcaccgagaatatgcaaaccctacaaatctctcggagcatcacaaaatttcaagatcctaatatatggcctatcgagtgcgctagaacttaacgttagtcccgtcattacccattttatttcgagataatcaatatcattgccaacacgtgcctctctgctctcttgcaatatccccaaatatggcagaagcatgccatcccccgcctgcaacagaactctctaaagcagagcgcttcaaagctacgcacctcgccgcgcgccatggcaactaccaccaatattacgccaagtttcgggcacctaccgttccagacgagcgcctttctattctcccatcagatatcctccgcgacgcgcgagtcatagacctaggctgcaacgcgggcaaactgacctatgaggcgatagcgcactgcggcgcggccgccgcagtcggcgtcgatatcgacccgtggctggtcgagcaggcgaaggcggcgtacccggacgggccgtgcacattcgagcactttgacttcgtggatgcgtccgcgtacacgggtaccgcgctgggcaagttcgacgttgtcctactgctctctgtgaccaagtgggttcatctcaacaacggggactccgggatgttgacgctatttgcgcacatacaaagcatactgaatgagggcggctatctcgtcgtggagccgcagcctatgagcaattatgcgagagcttcaaagaagaataaagaattgagagagacgtataagacgattcagatcagaccgccgtttgagactgagttgaaagcgctgggatttgagaggatattggaagttgagagggacgaggaggggtttgccaggcccgtacatgtttggaaaaaaaagtatcataatacgatcaatggagatggcttaaaatgagtcgcgcgaattgacttgcaccgggaagacgtagacttttcggttgcttagtaggtaatcaggacgaagtatatttgacacagtatttactagagaagtgacgggttaagatttgttgacagggatcccagagcagcataatccttacatggttatttggagacgaacctgggctattttggaagcgagatgaactctttctagctacattggaacctgtcaacggatatatggcagcccttttttgcccaaggaacaggaaacagaaattgtaatcttcatatcacttttcatgggtttgataaaagaaacagaaatacatgagtggttctagctaaaataagccaactaaaaaaggttaaaagaagagggccctttttgatcaatctcttaaggaaaccgggccctaattgcctaacgagttcaggagtcatttgtcgtcttagtcgaataccaagtcaactcacgttgactccattccgcaaacttagattgataagacacactgtctcttcgaaaagcctgataattggcaacttctgtcttaagttcccatctcgagagggccttaaccatcaccagtgtccggtccttgtagcttttaacatgaaccacaagtcggacaatactgtccgtgtgctgtgatggctttgttctagactgaccaacgacgaaattcgaggcgataggccatccacagttggaagaaaatggtagcaagtgcagtggaaatgatgctcgcaattgacataacgatgataacgctatctttgaaatcttcatccatagcgtgaggagaggcgaggttgaaatgggcacatagagagagggaagaagaagtaagaactaagagagagaaaaaagcagccgaagccaaattcgtcgcgggccatattctatggttggctttggacatactttgtgctcatcataaaattcggattccagcaagtatcagcatcatgttcacttcttaatatgacataatctaaaatccaaaagcactattctggatctggatgtggtatgctttctatcatacaattcaattcaagaagcgattggcattgacattggcattggtattggccgtctgaaagtcacttttattgccattcatggtatttttcaagactcgtcattgaagggtctctaaccacccgcctagtcgtaggctagtaagatatcccaaatgcgtcgatccatgttggttgtggtgtcttcacggctctgactgggagactgtttaattgttcagattcccatgaagccgcaagtaacgtcgacatccaccacgggtccctattttaagcctagatcgggtgagatctgaacagccttatggtggtaaatgatctctacaagcaaacagagagctgaagcctatcaaacaggacaaacatggcagggtattcaacatctctgaatggcttcatagtggtcgatcaggtgactttataaggtgatccgatcaaccaagaatgggtggtatgcattcacaatagtacaaccaaccattgatcttagactacatatatggctttatttatgtctttttatggttttttcatctgcttcttcgtctaattcttgtactactttttatgtggttttcaaatagaaaatgtactagttcagcaccacagaaataccatggagcatacaatagcagagtattattgattaattatagattttgaatatgacaggcaagttgaagcaattttatctacttcgtaataggaaagttatgaattggtgtcggccccggcaactccggtcatagaagtggatattcatattctcgtgaaacttgaaacttgaaacttgacaaattggcaaaccgatctctaattacttcccaaagattaaacataaacacccttttggttgttttggtgacgccaaatctcaacctcaccaccaccgcgaatcaccccaacccgcatggaagaaagcaaattgtgggcggcattggagtgagtgtagacaccaccgttgaatatggcagtagcatccttcccaatggccgatgaaatgagggttttaccaccagggtgttccttgataaagtcggtcacgtcgtgaacaacaccggcaatggcaactagagctttgccactctgagcttcagcaatgaaatcgtcccagtcgataacaggcagctgatctagaggaacaccccaatcaagcttggcgcgcttctggtcgagcttcttctgtagttgttgcacacggcccttctcgatttcgttggctcggaactccttgaggttggttgccagaccgagctgcttccacatccagattgaccacttggtaggatcgtactgccaccattggatggcattgcggtagtcggaggggaactggtcagagtttagtggatgcaaagtaaatataagggaacaattttcttacctcgtggtggaagttgtggtaaccttcgccgagagtgatcagtgcggtaacgacgtgatcgcgaggggagttcctgtcatcgaatggctaaagcgtgtcagagcgaacggaaatatgacaagaacaggatatggacaatgactaacctgctcacccaaccaatgggcgagagaattgacgcagaaggtggcttgctgcacaaacgagaaccgaagaatgccagcatatacaagaccacccttccaatcaccccatcccaggccagcaacgagcatagggaacaacatcccgaaaaccaagatgaccgatccataatgcttgtgctgccagacgacgacgggatcctcgttcaagtcggagatatcggtcctgcctttgttctttgggttttggttcagaaccatccacataaaatgcgaataccagaggcccttcatgacgctgtatgggtccttcactgtgtcggtccatcgatggtgtgccctgtgtttactgctccaccaccggatcgacccttggacggcgccaccgccgacgcatgcaaggaatattctgactggaaggacactagagatatcagatgttagtcaatgcttcatccgaagcaactagggtgaggcagtagcaggcttacgcttcgtaggatcggtgcgcccacagacgatggtagccggcagtgatgcccagtccggtccagaagtagtagagaattgcccaagcagcagtggctgccctcagcggtgtgtagcatgcagcgatgaggccaccgacgggtacgatcaggatgagggttgtgttgacccagttgacatgctggtaccagttaccgagtgtgacaggcttctcgctgatatgctgctttccaccacttggctcgggtttcgccattgtagtagtggagacgagacctgtaggtctctagtgtttatgaaattgtggggatgggagtgatggctgcgagatgagaatatttcaaatttgcggaccctggatccagagacattatttaacataaaaaaccgtctagctatctcatgccaatgggtcaatcgtcagttgcgttgctcccagcaagaaagtgttgaaccgttgggaatgtcaggcaatgcgatgcttagggaatttctccgaactctcccaccccagccctaaaatcagcaccgaatgattcgtcattgctggacccattattagttaaaagattttccattttcataattgatgcttaaatcatcatcagaaatggggagtccgtcgttcgccactgatcggaactgatccactcatctcgccggacatgacgaaaatcatggaatccaacgttaagtcatgatttttactcaacggtttagatataggtatcgtatggtcggataatggtcaggtggtagactttgctacgagttgttagaagtccatggtagcctaggtgataacatatctaagtgatctagttacttccattgaacaaacgatggatgatatattttcaagcaaaacatacaaaacttactcatccggacttgttttgtttttgatgtccttgtttgtcgggccttcaaatcgcaagccatttcctgagcttgtatagaacttcggattttcccaacatacaggatctagttccatggcgcccgatatcttgcgcacatacacgcatgcggttgttaattaggctcgaaggacccctcctaattcccccgcggaacatcatctaatttgatttaacacataattgctcgcacactacctatactccgagatgcaagtggtcgaagtgaagaacaagaatcttctgaactaaagatcacagttgggcgacctgacgtggtgataattccattctacatctcgggcaatgtgacaattggcagcaaacctgtcgaattgaaacggcactaccatacaatatgtcctttgctgatggaaagggaggaaggaaaactaggagcatgggttttcaagctcggataatagtaggccttctctgcccttgattaccttgatcaccacggagattgcttttcttttctagtttacccgttgaaatctatcctcggcctactttatagccttgatacgtattataggccctaggatgcatcgaatgcgcttcaagcgtaagcacgtgatgttagaggcccctcgcctcgcaccgcctgcgcatattccctttttgtattgttcacatcaaatactttttataccattctagaagccagccctggctttgaagcagcgatggaaccaagccacgagacataacaagcaatgagatcgcaatccacgacttacgaggaaaagccaaagaaagatacccagcaagcaatcagttctacgatttcggacggagccgaacggacaattcgatcatcagaacaagatcttgtttcagaacttagatccgacagggaaatattgcccatttcatcttgccgtcaaacaggcacgttgaacgcgtggttgtggaatggtccatagtgagtcctaaccatacctattgttacccattcctaagtatcgatagatccggtcaaatatagaaagagtagtgaagaaatttcaacggaagatttctcctgacccgagagcacatctgttaaaatggtccgatatcgaccactcaaatgccgcaccatggaaccgtgagtcggggtatccggatgacaaaacgagcataatagtctggattgcgttgggaaagcttggtgtagataatggattcatatatgaaatggagagtggccaggacatgagtctagatggccgtgaggggatacctttttctggtaacggaggggggttggcagtgttgttgttattacacatgagatgtgacattaattagaatatttggacctggatatggtgaactaacccggcaaggaatatgattatgccccttcgaaaatattagttagttagtacatactccgtaactaactaatcagctttgatttgattaagtggggatcacgtgaattgtcggggatgagcgggaggctcaaactctaaagagggttaggcccaccttcccgctccccacacttgttggttcggtggattcggcgctttgccgaaggatccagaagcgaagagacagagacacgacacggcctggatgatattggtcctgaaaagcggaagcaaaggatggaaaactatcaacaatgcgttcactcctcaacgctgggtctgagactaccgcagcgctgctcggtgccattacctttattttgctcaagaaccccagagtcatgaagaaactgaaatgcatcaagtcggctatcttgaatacaatggcatttgatcggatcgaaggtcgcttaataattaccaatatctttggaacagctcatgggtaagcctttaatatattgggtgtgttggaatcgattgtttgctgatcatatgcataaaggcaatttggaaataaaattgttctatccgccacttacatgtcgaacctacgagagttggttgacagggattgactccaatgccttcttgagaggacgatccgattcttgcaacatacggggtctggttcgccatccctacaagctgatatggagattctcactgaaatctacggacatatctttacaccttctatcggttcataagcgttagagcagccaatttggttcttcgactgcgctccttctgagtagtatcggataatttctttattctccacgatatttggttcaaacgctcgaagcacactgcctgtcttttctgattctctgttttcgaaaggccaggagaaggaagagagaggagggactacaaatgtattagactagtcgactgcactctggaaaataagagtcctggcaagtagggtcaagttaccgcaaccatgctcctaaaatatgtgggctctatcagatatgttacatgactaccctctcattctacaatactagatttacactactagctacatcaacagttagggatatccgagagttgacccagtaaatgataatttagtaacgaagaccatcgagttctcaaagaaacaagaatcaacatcccgcacaagcaactagacagtgtcacgccaatcctcaaactcccgcgtcgtcagagggaagaccgcaacgttgctggacgtatctccatcgtcccctttgaaaaagaactagacggcgttacgtccatctttagttttaagaaccatcctctccgcgacttcatctggagattgcatattgccgaaaccataggtcggtttgccacaaatggtgccaatcacaagcttcgccagttgatacttgcggagattagacgggaccttttcccttcgtcgacaagttaagataagcgacttccactctgcgctaggccaataaatacgctggatatcgggtgcagggagagactccagaaccgagttcgggatagtgatgtgaataatgacagtcgcgctatatatgctgcggcgtttagcatagtaggcataatattcggccacttctcgctcaaaagcaaagtaaatatctgcgtgtcgtcccgagaaatcagtaggtggcgcggatgtaaggcatgaaaagtcaacgctgctatcattgccgaatagactatcaatctaagcttggtcaatacccttgtatagagttttgtaccccggtgcatttgcagctgcacttgttacagcgggagacaaagcagtttcgtgtgacaaccaaggtaccaccgatatcgatcgtcatccaggtctggaagcttcccgctgactagccatatcacgcctacgagaagcttcttgtatcgcccgtagcccccggtgtcgtaactgaatagtgtcctgaacccagaacttacaagtttcggttagacggatatgttgaaacttaggatccataatagcctcctgaagctcgcggttgatgtgggggtcagcgggagatgttgttcttcttcgtcgctggatctattcaagcgtcgtttatgaattcggcgggtgccatcatatagaggagggctggccagccctgatgcctgcagatttaccgcatcgtcaggggtcagaatacttgcccagtcatccctggatataaaagacatcgtggattttttatgcgtggatgaatatgtatgtagtgtgagattccaggtcgttcttgaataagaaagagtacatttgactaaataaagaatataagaaactatctgcatacagcataatggggatcatgtgacaccttccagcaatgaaaatgccttcaatattggaaagcatctactactaagcctaattaggaagttatagctccgtgaatataatgagcccgggcgcgctcaattaaagcaattggtcaaaagtttataggaaggtcaatttcacatttgtaaaaaatgagagagaagaaagacaactgaaaagacatatgaaaagactaccgcggcaactccccggggccacattgataattgtcagatatctagtgttctcacctcaacaggtaaccagccctcacatttttctaccaatactgctttgctactgatggtattagataggaaacgccgagatgtataagctcgaggttagttgtgggaagcatggattagatggcattttaaggacctgaaatccgtggattggcagcccacttcatcacctcagagttaataattatttctatactctcatatcttaaacaactattcaatttgagacaagatacgcgatagaatttgttggacccaaactatgaatacatccaatgtcgacaaatcaactatagagtcgcgttggcttcggctctttgccacaatttgagccaaattcgaagtctcgaatatcgccagtgaaaagtggtatctgacaacttagtagcgattacaatgacggcagaatcacatttctgtagccagctatacatgtacctgatacgccaacacgtattcgaccacctctgcacgctggaagctgattcgattcatgcgcgcagcgcgaggcgcttcaaggaaatggttctttagggttcccaagactcactcctcagcatcaccaaattcatgtccgatgaagatggggaaggctccttcacccgaaaaggctggtagtgtgacaatgcaaataatgtgcgcagtatgagttgatcaacattaatatatgcgtacaataccagtaccctatacgggttatttaaatatcatcgagactttggctttgggttggctgatatcacctatgggttggtcttgtccgaccgccgggttttggacgacgtgaatacacaaatggtagtcttgccggttgtcatgggccaagacgtgccgcgaatgtcctactggcatatcagaggaacaaggtagtcgggaatctccaaggaagatgtgcaaatgcatctggtcgttgaagcttgcggtgtaacattgaattaagtgcccagtgtgaatgacgtcgatttgtactccgtaaagaattgggtcgatggcaagccgaggaaatatttcctattgtcacatctccacttatgtttcaagacacaaagggggaagagaagatcgtgtccaataatagaactccaaagggttgtttagggagatgcttacctaaccacctcgaggaccgctctttcgtaccgcatcgggagacttgtttatggcttgccccgcgttttctctcttatttatgtatcataaagtaggcctgtgaatagttacgagacgactgcactttttcattgttgcattccttagcgtgcgctcttccacccctttggtggcacgcgtgcctcccgagattccatcgcatgagtccgccatgtcggcctcgtcgcgcagccagagctcctcccccgatatcctaggtcctccgggcgatgcccagtacttgatctcatcaccgatcaaaccattcgcagggcgccaaagctggatgtctcctatggtagcgaaatcacggactccggccaagcgaccgcgaccgcgcggtagcctcagtcccgcaaaaagcgcgcattcgattcaattcaaagatgtcatactccccgggtcgccagcaatgaagtttaatggtggtcgacaaaggtcactctctccggaaaagcttcaggagggaaatgtcagcccatggcgcatccgactcacgctggaagcgacacaagacgaagatgacgagaaccggggtagcccgtcgcgcaaacgattaaagccctcggccataacaacgatgataccattaaaggatgagaggagtccattgaaggagaaaacgcagtacaagaggcgagggcgtcctcgaaagtctgacattagtttgtccccgtttgctgcgcgtacccctcgccctggacatacacctgggccggggaatacacctggaccggggcatactcctggaccacaagctggtgactctcaaccacgcaaaagaggtcgaccacggggcacgcccaggcccaaatcacaggatttccagttgctgggtgaccaagcaacgccgactatcgaatatgaccaccactttagtccgatggatatcgttccaaatagtgatgcccgtcacaaccagcaattcagtccaatggacaccacgaccaatgaaactggcttaggccagcatgaatacagtccgatggatacaatacctagtgatgctagtctgggccaccgaggattcagccccacagatgccctcactagtgacgctagccgaagccaacaacggttcagtccgacggattcgtttgctggaagtaatgcaaacgccagtcccttgaatctcataggggatgtggaatccgatgacgactcttgggggaactcggagatatcaaatgcagagcttctccatccaacagaacccaatctcgacaatactcgccgtgattacggccgaacgagtttggagacacctgttatcggagctacggaacatcactttttggatgatgagaatatccactccacgccttctaaaatgccatcaccgacacgcgagagagctatgttgtcatcgagagcttctcgtaataccaataccgctagcccccaatcgcgcacatatcctactccgacccccacatcttcgctagccgatgaagaaaatcaaacccgacaagccgactcggatcatttcacaaggacggagaccgaccatgctgaaaccgatcccgttgaagatcccgcggacgagtacgatgaattcgacactatcatggaaagtgaaggattcactatgatttcccttgatacgctcccgtcagccaagcagcacggattcggctccagcgctacgacgaacagcggtcccaaaccgaaggaagtcggagaacggttgagacgcaaacttcccgggacgatccaagatcttcgaggtgattctcgtgctgaaaaggcatccagtccagtcactacgggcctagattctgggctatacaaaattccaagcacccatattccggagaagtacactgcacatgcgatcgagcggcaatccgttaactacgtgaatgagatcgcctatcctgagctccctgccgcatcgtctcctgccaaatcaacaattgttccaaagaagaggacactcaccagtttggctaaacttgttcgacttagcttggccctacaaggtccctttaagccgcaacaagacgagtggtctggtaagagtaatgcccgtcacaaaagacgtcggttggagggtgtttttagcacattcaacgctgaaacgcagcgggaactccgagctgctatggggctaggacaggagcttgctatgcgccggatgctcgccgaggaagagaaggctgcggctatagcagcagatcatgcggctgctcgtcgtgaggaggaacgtctcgaggaagaacaaggagaacaggaagaacaggaagaacgtcaatataatggcttcaatgacgaagaatcggaagagcaggatcaggatcgaccctttgaagacgagatcaagaagcaggagcggtacatccaaccgtcacgttccagtctcaacaacttcattcagcaaagcccggtgtccccccagaaggcacagcgggaggcacaatggcagcttgagcgagaagcagtcagccgccaggctcagacggctgcaaactcacaatccgtcgtttatattgatagcgatgataatgcggcggaagaggatcggggcatcgaacctgaacatgaacaacgatttgaatatgagaacggaaatgagtttgatgaagagcacaacgattctgcacctgcacccgtgccagaaccagcgtcagaaccagcgccatatgtgccccaagactttgagcccgagcccgagcccgagcccgagcccttggaagatgaggatgatggttatgacgacatttggcaacttgaagcgaatgatcacagccatgtctcacaacacgtcgaggatgatgatgtccggtctcatccgaacccgcttgcacgtcctttgggcaatattgccccgatttccgcaggtaaagactacctgagttcatctccttaccctacctcagagcagaattatgtagcgcgcttcggaccgtccaaggtccgcgagctccgtgagcaaaaggtcgatttgtctgctttgcttgcagaagaggatacaccaaaccgcgcacggtattacaatggaacgagtacgcctcgtttactcgcccgcccgtcagggacacagaattcaccaatcaataattctgtcatgaaggatccggtatcgcgcactccagcgcgcattcgtttacaacctctctcccattccagcccggatactcccaacccacggatccacagtccacaaatcgcgttacttgatgggaagaaatctccgaagcctatacaaagcccgcctatacaagagcagttggaagaagactacgacagcagcagcgtttctagcgccgctctcggtcaatcggaatctgccaacgtggattctgcctccaccccgcaacctcgtcagctcaacaaagaggagccaggatcatcctggttcagtaaaataaccagtttcaccccgcaatggctgaaagccccgacccgtggccgaagctcgagtgttagtactattccggaggaagcatctgaattcgaagatgaagaggaaatggccagcattgaatctgcgaaggagcttgagggacatctccaggatgagccgctctcaaagcaaacgagccaatcaccggcgagcaattggagacagccatcaccatcccagtctccccagatccagcaagatcctcatcctaccgtggaagaggaggaggttccgatgaatgagagaagtgtttctcgggacctccgagaagaagagcagccggtatctgggcgtggtgtctcgcaagatccattagagaacgaagatgtagagccagtgaaccaccagaatggggcatccccagggccacgaccacttgctgtcttcggatacttttccgatgagcattacgccgcgctttgtcgtatctaccgaattgccaagcgataccccgagcactttgaatatcacgattctccagggcgggctgccatcatcggtgattggatatggacctccgatggtcatcacggggtgcccatcacagagattcaatttgccattatcgatcgctttgctcaggagcttgctcgggctgatatccaatatgctggcagcggacagatcgattggacagaagccgatctgcatcggagactcattagcatcattattggcgagcagatccgagaggaaagaaaggccaaggccaaccggggtgcttctgtggatacatggcgatgaatgtatatttcttttgcccacttctttttgtctcatgtacattttttggatatccgatgagcatttggcgtcatggttttgttttgaatacgtctgttcttgttatgattatgattccctcacggttattggttaggcttgtgtgcagcattgggctgttttggagggtttattgtgcccgtaattactttaggcgtctttctctattctctagccttgtcagttggacatgaatgtgggactgtatacttccaagtttgaccaagtgcgaaagtaccaaatcccgcaaggggatccttgacttcaactgcgaacaccatgtgtatattgcatctggagcacatggatccagccaactatggaggtctgctgcatcgagatcccttatttccccgagtatctgacagagtagggatataaacattaatcgcatgagttgagctcagtccaactcattgtacttccttcgtacccgctagtcaacgtcagcgtcaatccaaacccactttgtctcctcctaatgaaacaactgtacaaccaaaccctcaaactgtcaaaccgtcccagaagcaaacacaatctacattgaagtcccgaccaaccctgcagtcctccgccatctagaccaaccacgccaacccgcgcttcctgcacgatcgtatacttctcgcgtgggcagccaagcagaagccggagagcctcgcagtccccacctctgtgcgaggttcctgcgaggtgtccctgcacgggttctcgcccttgagagtcggtctggctagatcgcgaagtaccacatgggaggcgacaccggaacatttataaaagcaagggttggtagcagcgaatatgggcagcagaccgttcccagagacgaatatcaagtaacgtagctctatacgtcgctcatctcatctattcctttcccatacatatagtctatgtgtgtcgagatcccaaccatgtcagtcttcacaatcgtctatcgagccctaccaccgctaccgctcccctggaagcgccgaacaagtctgaaaggcaaatcccccgagctggaaatccatattgatgaaaagaatcccggctcctcagactccgacatcagtccccacgccgaagaccagcacaatggaaccgtcttcatgcaccgtgacgtccacggccccgtgcaggtagcggtgaagactcacgcacaccacaacgcacccaccccccaatcactatcatccacgccggacaatatcccgggaccggcgtcgggcccggcttccgagtgccgggtgcactattccagccaggcgcgtccgacgcgcgcccagcttgatcgcgccgttagttgggcgagtattatccgcagtcgggaccggtggacggccgagcaggagagggagcttgtgcatgcgaagagacagctggggaggtgtcagaaggcgtggagttccgagcaggaggtgtggttgacctatgtatgttggcgactatttttgctttctttttcttttttctttttctctacgttactattgtattgttccatgcaatcgagttcgatatcacatttctgagtctgagtcccgacaggagagataacgaactatgaactaatttttgtcggttcaggtccaggccctcagcgaagaaaaggaggcccataatgggtttctgtctatgcggcacagacagcaggacgatgaacagcaccagttccgtaaggcgtggaaacggcggcgatcttcgtcgggtgatgatgaggtgcagcagtctgcgatcgagactgcgaatcgattggggaggctacgtcgcttgcagcgttatagttattcagggcaacggttgggcgcgacgggatcgacagttttggctgtggagggatgatttaatgacgacatggtttctaagtgtagggttgaaaagatagaggttaatttgtattgttcacaattctggagtattctaattagtagttgaatggatagaatggactggcatatctaaatctagtttcatatcatatcagtatcagtatcagtatccaatatatcagaattccctagacatactctcacaaaccccctagcgatacaaacctacgagctcttctacttcccatcaggccacttcctaaacaaatctgccaacaaatccaccggcgccgccagaagggcagcagcactctcgaagaacggctccgtaggcgccatcggatgcgccctcgacggaacaaacatcttaatccgatccagcgacttcgtcaacccaacactctcctctttactcagcaactcctcaagcctaggcagatccacatcctcctcatgtctcgcatgaataccgaaatcgcgcataaggccctgcagcgtcggcacgaagcgcgggtccgtagacgaaatatcctggaacgctttcagctggtgcttgacgccatgatgctcgagtctgtttttatcgacgatgccttggccgtctgggagggagtcgatcagcgccgggtagacgacgagttcctcgccgacgaggtggcgggctagctcccaggtgaattggttttggaagcgggtttgctcgtctgggtctgttgagatgagaagtttgcggctgtgggcttcgagttcgaggtggtcgtgttttatggcggggaggatgcggctgtggaagtttggggctgcggcgtcttggctgaaggcttggaaggttggtctgatgttgccgcttatgaggggattggcggtttcggcttttgctcgtcgtgttgtcattggttttgggatgggggtgtggatggcgagggcgcgccggatcatgaagataagatagaagggtagaagggtggtttggtgcttgggatgttgttttgctgtagttttggaaatatctggagaatccgcttaatagaatagttataatagtcggtgatgagttccgtttttgtcatgatgatgaggtggatactagccctaagtcgatatcagtatagaacatcagccagtccatgccccagttgaacctactattcgactcctggatagtatatcttgggggagactcggagttgtattgaaggttagtttgatggagggaatccgaggtggttgaaggcaagatagccctaaagggttgccctcaagcctgtcatcgacacaattgccatctggggaagaaacaccggggataagctgcatacatcctcctcgcgaatggccgagactatgatatagattgacaaccgcctaaaaccaagttacagacttgaaaaacaaggtatccgtgtaaattgtactgcccaacataggggcaaggaacctagaaacgaagtgctatgcgtgttccccaacgcccagcggggcgaacatcagtccgaaaaagagaaaaagaaaatagtcacagaaaaagaaaaaattcaaatcccaaactcctccgaggtccatccctcacagcatagctaatatgatcaataaagggtaatccatgaccgcgacctgcggtaaacaccatccatcccatcttaacgtacatccgaaatttcatgcgcgtatccctcagtgattgcgggtacgcttgcgactgcgctcgcgttccatggccgcaggctggaacatctcgtagcccgggttgtagacggtaggagtccagtcgacacccattggggccgcgaaatccgggtgcagttggctgaagatggcaggatctgacgggtgaccatcgacctcctctgcggttggaagaggtgccgccacgagttcgactagagatgtgtcgatccaattagatggtttggcagcgaggcggctgatgcgagcgcagtcgtcgtcaacttcctcgttcatcagggcagtcaatgggggcgcgttgccgttgggtcgcgcgtggtgattggagaggacgtggtaggggaggatcgggcgggtggcgggcttatcggccagatcagccagggcgctcagagcactgtgcgcggcggttgtgcgggtagatcgggtagcatggaaattgtgactagccgtgcgcatcatatccgccgcacttggggtgccgttatcttcgtggcctgtgccctcgggtgtctcatccgcgtcggtattgttaccattcgtcaccgcgccggttccgtgatctgggcgcttggatgtagagaagaaatggacagccgccaggtgtgcctggtttgcgtgtgcgttgagttccttgtcggtgaagagcgagtgaatcgagtaggcgggtgccacctgctcctttgcggcctcggtcttgttgcgcttcgcgggggtagcatcgcctgcgtccagcgcaggcgacccattgtcctcgtccggagccttccgcttgcgcttgtgcaactcggacatgaaaccgttgcccaactcgtcgaggtcaacgcggtgacgggtgtgccgagtggtcttgcggttgccgtggataccaccagggctggcagggttcgtgatactgaactggttggggtggaggaggagggcattcgtgtcggcaatgtcgagctgctccttttcacgcatcagacgggcgcgctttccggagatattctgcaccaatcgctctcgaagggtagcagacagatgacggaattcttcttgagcgaaataagtacggaaatcacggtcccgctgttgtcgttccatggtgttgttgtagttattctgtataagaaaaaaaaaaagtactgattagcgaaaactccttatagatgagaaaaataagcaactcaccatggccttaaccaattctgcatccctcctctccttgatctcattaacatcctgcacaaacctggaataccaggttccagcgaggccagccatctctttcgcaaacttgctgccgccgccaatcgtctcctcaatgagcgaggcaatgctctccgctgagtccgggagcggtcccgtcacgtaaggatcagcattgttgatcagagtcatgtcacactggagggcgtgcaactgctggcgaaactggatgtcccggttattgctgaactgactcgtcaattcctggagccgctcctggagcgcagtgcgtcgcttgtcgcgttttgagggtgcgccgccagccccgccgccagggctgaggggcggagggttcgggtaagacattgtatgtggcgaaggtgggcgagaaagagtggtagatggcattaagttggtgaaggaagatgagatgggaggggtggatcacggttgaattgaacggcagaatgtttggccgccccggagaatagacagtgaggtaggagataagaagaggaaagggatttcgtactaacttaagagaagtatttggaaatataataggtaaatacaatggattcgtatatattatccgttttcccattttctattgttgtttgttctgatatgttcctattgatgttcctactaatgttcctcgcaattgatcacagctattgtaccttggatatctatcggtaactaagctagcgaatatccggcaggtaatactcgaaaatcaaagggactgactgtattcgacatatcgaaacctgcatactaccaatccatgggctgtatacggcgtgaagaccaggaatagagttcatcatcgccatacaaaagaccagtatccgcacctgggtagagcacctcaagttcatctttaacttctgtgcagtttcagttgagagccacatgtatctctccactcttcccgtattcgctaggccgcctccatatgtacctggagttttttcgtgttcatttccacagggatattgcccatacccgatctccatgtcatagtagctgacagtgtgatcagtgagatcatctctaggctccagatcagtctgtaagcctggtgaggcagtgagtgatgctcgggggccctactatatattaaatttagggctgagagcaccattgcttggatattaaactattttgaatctgtaaagatactgaattatataccacgctacttatgcgcccagaaaaacaaagtggaggtgggtgaatcttcatagggtctatagggtagactgttgtaactagtttagtagagacttaaacatgatcacagtatggctatctctgtattagactcgcgccgtgcaccccgctctggtcaatgttgctctaaagtgaggtattagtctcttttcccctcgaataccttgctctcattcgctaagaaatctgcactggcctgctaagtgatagagttcccctcttttaactcaaactttccgacgcactcagctgtatgtacgctgtcattctcgagccctggcactggccttaaccaatgatgctgcgtggtgatacctgaaggagattacgtgttgatctatcccccaaatggtgagtgtagtatacatgagctgagctccttcgagaaataatcaaataggcgcacgctagtgcacaagctatcacaaccctagagatattttcaagtcacagccaacggactttcagctgtatgctagaaagcccatcagtatgtgtggccgtggacagagccgcattttgagcctagttcgtaggtcaggagcccccttttggatcctgtcaagatataaatagggactgggttcccatgccgctttctctctaatccagtgcccctaagagcattttgtcttcggtggcttttatatcttcattggacatatcgccatacctccggcaggacttctacgcacaatggcgactctaattgtggggctagcaataaccgattcggggaaagcggcagccgccaaacccgttcaggatgtgtctaactggttgaggaagtggcggggactagtgccattttagggatggagcggcgccaaattgcatctggccacgctaaaccggaacgggggccgatgaggacgccaaacccgatcgaggggggcgtcggatccggcgccgtcggcacaaatggtagttgtccgcaatgaaagccatagaccaagttatgagatgagctatagttaccatgtaatttcggtgatgcctaatgggagcctaacgaaaccataagcatgatccctgcagatacggagtacaacatacatattccagtgatatcctagattacagaaaagaatgttgttaatagcagatatattcccactaaatcgtgtatatttatatccatcatcaagacaagaaaaaaaaaaaggtccaaaacgtcatataagacccgaatcgccaacaccggggtattcatagttcattcaaaatgttcacgcggggaaatggaacccccaaacgagtaatgcaaggtgcgaaaatattacttcgcaccggaaaatcgaaatccaacaccggggacacctccatgggtcccatgtcatcttttgtcaaggccgtgtgttaaaatatgctattggggaagaaggggtggtggaaatgaaaggggtgaggattcgaaggtggggattcgaaataggagtcgaggaaaaaggaggaaaagcgatctagcaatgctgcgatctaattcgttcgacgaatcacaaagacaccaagctcgataccatcacgaggctcgttgtcctcgttatagcgtcgtttgcggatgccgtcgcagatttcacttaggagcccggaaggtgtgacttctttattgcccatcatggagcaaccggagcttgtcctcttagatgcacggcggccgttttgccagtacagattgaggagttccttcatgcggggcttttcctggtggatgaaccattcggcccagagattgcggtcgaggtgggtgtctccgcggcctgcatcggtcacgtgaaaccgggaagatgaatcgttgtcgctcaatgattcacagagcgccacgatgttcgccttcatggtggcgaagtcgtccatctgggagacggatgagagcttgccgaggtagcggctcacgtctgcggacaactcattcaccaccacgagttggcggagaagggggtcgaggatggggcccaagtattgggacttgaaggttgatgcacctttcttggtcgggtacacgaagaggagggagccgccattcggtgatagctcactcagacgatcaacgaggaaagacggacgggtacggcaaaacaaatcacggtactcttgggcagaggttggagggagatagcgctcgaggactgagatgtgaacgctgcgaggggggacaatgggcatcggagcgtgggacatttgccgttggaggggtccactgtagtcatggtaagcacccacaactgccgcactggagaaaaccgtggcgttgaagtattcctcggcggcagtcggagaacgaggagtgctaggaggagagtgaggcagattcgaaaggctgaattgctccggtactgcgtgggtgacgttgatatagggtgattggccaggttgcaagtggttgtgaactgcctggaccatagaggtaaaaacactgtcggttttcggtactgacgctgcctgatcagatgtcctagggtatggaagagtctgggaaacgattttgacggcctcgccgcctgtcttgcaaagggcaagtgatgaagctggaaaagtcagtgaccggccctgcagtatgaatatgtaaaaaaaaacttaccagtcaagttgataccatgatccagccatgagccaatgtcctgctggcagtccatatcatcgtggggcccagggctgcctccagagctggaggatctcccatctgatgggctgctgaatgtgtccgaagcaccggtcgcggaggaattgtccacgctctggttatcgtccatcatagccatagacctcggatggtgggagtgcgcgtcaaacaacatcatctcggacttgggattccacgcaacgtggatatcctcttccggcggcgtggggggtaatatagcggggtattcctgataatgcgcgttccaagacggcgacggagccaaaggcctcggcccgcgagacacggtggttgaaagacgaagacgagagtcgaccgaccgagtgcgagaatccaaacggtacggcgaacctggtgaactaggcgaggaccgttgatcccacgatgggaagttcacggccacgctactcttggagagaaagcgagagaccggtgacggtcttgttcggagagacccctgtgaagctcgtcggcggatcctcccggggttgaaagtttcctgtatatctgagttctgggggaggtgtgctctggtgtcgagtttcactgttggtgggacatgcatggtgtgatcgtcaagtgtgggagtgccgggccagtactgtgcattgcatgagggtgtcatccagtctttgttatccgggcgcagatggcagcggtcatgaatcatgcgtcggatgatcgaaggatgaccaaaagatgatggccgggtccgagcgtgggagtggaagttggaggttgaggcactgaagagatcgacgttaatgagaggagggaggggaaatgattgagtcttgttaggaaaagaagggataaaagagaagaagaagaagaagaagaagcaaaagagggcgtgaatcgaatggaaatggacgggaagggaaaagtgggtaccgggtatagtatgggcgaacaggcactagaccaagtaccgggtaccgactggggcaagggctggggccagactcttcaggtcgggacagtctagaccgtccaagtcatggagtcatcagtttccacctttttacgttcgtttttttttgctgtaagggatattgaatttatatagatactattcaatacccttaatctaatagacgtaaattatcaaaaaatacaacgcccaatagcgagtatgcagcgtggaggacaagtataaaatatcgccagtctaggctttcgtcttggctccacggggctgacgatcattttcaggtggtgcaagtcgaggccagaatacctgaaaatcacaggatccgaatatacttgatactccagatgacactgcaaatgaattgctcattacccgagccagactcgagcagctctcttgcttcaacatatctcttccctaatgcggcttaagccttgggtttcacaagtcgccagtaccatagaacgcatgtggagcctgggcctggacgaggtactgaggactttgccagtgtacgcatacgatattccgcttccggtgagttgggcatcggcactcatttgccaacgcatatcacatacataaaggctatacacatataagcctaagtatatatatatagatctacgtctagcttctatatacgctagttcgcagcaagttcgcagttggaagaccctgaattcttaaccctggattcggggtggcaccatgacaggcaaccccatacatttcagattcagatccagtccagtccgatctggacgttgggaccgttttataatttccaccgtgcgccccgatctggttcacttccctgttcccatctccggcggactccactgtctcacctagagtgttgccactattaatttgaggtgtctgtccatctatgggtacgaattcgcaatttaagaatttggcatccgtggatgggacggcacatttcggtttaatatatataaggacacgtcagccgatattacttgcatatgatagaagcgcttgaaataagatgattaatattagattatcatatcactatgtgcactcgacatgatcaacaaatcacatcatcccggccatagagaccgatcgccgacgcattccatggaatatctccatcgccccgaggcgatggttacttcgattatccacggttccggtcccgattgcatcaccacagcggactccagatccgcgcagacccttgcatctcgagaatctggtctcggtcgcgtgcaacactggggagtgccatgtgtgagagatcggggaaattttcggatgccaatttccgatagccgataggctctctggacgtagattgcgaaggtccgtagatcctttctagaaccccgaatggttcaaccagcaaaaggccaacctggaaaacagccccggtctaaaaccaccgggctgagagtaagaggggaaaaaaaaaatgcatatggcagcagtcaccatagcccaacgaagctcctcatgaagttagcgaccggcgccgagactgagtcgcagtagtacagccggccagcggctgtctcatctcctgcgagcaattccgcagcgaagcgcggtatctctgctcctcgcgcgtcagccggacctgtttccgcgcgaaactagacggcttcagggggatggtggagcgactgccgtagataggcatgggggtcttgcccagcgacgggttcacccgagccgggttatcgagggtcgtgctgagctcgtagcactgccggacgagctgctgcacgccgtccgtcagacgggacgcgcgctcctcgatatccggccagaaagcatcgccccagaaggggtcttcgcagacagcggtctcgagggcgttcagccagcactggaagccggaacgcgtgcccgcgagctgcgaggcgaccgtgacgaagcggatcgtcggctccgagtgcagcacgtgctggacgatgcacgccggacagcgggctgtgaggtaccagtcgtgttcctcggtgaggatgcagttcagccaggcgaaggcgctgcgggcttcgccgcggaatgcgcgttcgggctcggcgcctttctggctggggagggtgcgggcggcgatgcgctcggcttggtggttgattaggaaaagagggacgaggagggtgtggatgatatcgcggtggagacggaaggtttcctgttcggcggcggtgcaggcgtggcgatggccggcgcagaaactcggtcgctccatgccgcattcttggcggcggagctgttcgcgcattactcggaaggcttcgttgcgctctagctcgacttgctcgtgtcgagagatgtggaacggggaggccattgtggatggggactccgtatatcggggaatatggttctagatgattggatatgatatattatagaatcatatcgggaattgataaggacaggtacaggccagggctgagttcaagtagttccatcagagaaaataattcagggccacgaccggatgcgggcctggatattatatggtctgccccccctttgcggaaacgtcattagccaactgtcccgtttttggggaggccaaatgaaaagcccagacgatcccaatggacgactccactagctgacgaacactgtgcgtacgacgacgatcattggcggacatctcggaatgaagtggaggagtggagattggagagtctggccggtcgcacatccaacagcggttggggatgttgactccgtatactcctatagatcgggagacgtaacgtccctcacatggctattacatgattccatcgatattgacgaatgcgtggtttcgttgcacgtcaaaaagaacctccttatctcgccatgaccgcgttctagcccgagtcaccgctaaaaaccgcccagtggggtaacgtggcagtctggaatttcaaaagacttccaggatcgcgttggcgttgtgactagtgatattcaaagttacatgcattaggggtccacgagacttatcatccctgatttctagcccgatctctgcccaagaagaatataaaaaataaataaatgcagtaatgtcgatcgatgaggcaagtattcaaggtcggactaggactatctttcctatgctagcaagagtggatataagggccaagtccaaaatagcagtgattgacagggtttacgatggggggatacctgtccaacatggtggtaccgaggacggagcacagtgatagtgatgataatgatggtctgtaaatagctatcataacatgtctcaaacctcaatatcgtggttatatatagtataggggagcgtaactatgtatggaactcggtagattccgggttaggggcaacattaggggactcttaattttaaatccttttgtactggagactgcatatctctaccaataactatctattatcagtacggagcacggaggactccgcctagattgactccatagtgagctactccagatatctccaattgcgtgggaattagggctcggccccaacagctatacaacataccctcgaacaatcacaacatggcacttgtactcgggtgtatacctttcgcacttcgtgtcaacgtctatatcacattgtacaccctcaagcttgtaaaacaaattaattggaatgccccgaacggggcctggaatgaagcacgctagttgaaattaatgtgataatttcgttgctacaggcccaaatcaaggaactgcctcctttatgtttcacctcgacttgccttaaaatggttggaggagcgcttttcccgtttgcacctgccttgttccttcgttgttggtagtgtcaatttgagctgaaagcctttccttctcttcactctttagccattgctattttatcgcgtcttgcactgttactcgaacagaattaatcatgttgtcctccctggcattttccgtgccattgctcctcgcgggcctccaggccaccaccgtcggcgccatctcccccatttcggcggtcggctccaagttcttctacgagaacggaacccagttctacatcaagggtacctgagaaccctgcactgtaggtatcctgtctgactgactcaaacaggcattgcttatcagcttaccccaagtgacccgcttgtcgatactgcccaatgcaagcgcgatatcgtccggatggccgagctgggcaccaatgctatccgtgtgtaccacgtggatgccagcgctgatcacaaaggctgtatgtcggcattggccgatgctggtaggtcgagtccacatgagcaatccccggtaaatcatactgatgcgttgtaggaatccacttgttcgtcgacttggacacctttactacccagattgaacaggtaactccacttctctttctcttatggaccatctgttaacgatcgcagaccgcacctcactggaacgaaacccagtttgatcacttcaaggccgtgctcgatgagttccaacagttcgacaacaccgccggtgtcttggtcggaaatgaggtcctcacgacggccgatggttcggcggctgcgccctacgtcttggcagctgctcgcgacgttaaggcctaccgtgataagaagggctatcgcgagattcctgttggttactccgcggccgatattgccgatctgcgacccatgctgcagaactacatggcctgttctaagaatgcgtccgagcgcttggacttttactcgctgaacgcctatgagtggtgtggctcgtccagctatgaacagtctggatacaatatgctgcagaagaacgccaccgattaccccatccctatcttcttctccgagaccggctgcaacaccccctcaccccgcacctttgaggatcaggctgccatcttcggcgataagatgtctgacacttggtccggatccatcatctacgagtggatcgaggagaccaacgactatggcttgatcagctatggcgcttctgtcgacccggcgaccgcaaccgcaagcaacatcgaggacggcttcacccgccagggaaccccaacacccgtgtcgcctgatttcaacaacctcaagtcgcagtgggcgactctgaacccgagcggtgttgccctttccgcctacaaaaagagcgcctccagcgccgccatcgagtgccctgcctcgacctcgggtggatgggccgttgacccaagctcgccgcttcctaccttgggacagacctacaagaagggatcttcatctgaatccacagcgaccggtaagactaccaaggccagtgcgaccacttcaagcggaacatcctcggcatcggcaacaaaggaaggcgctgctcactctgtgactgtcggctcgccagctactgagcgcctgctcgctggatccttggtgctgtctggtctgctgggagccgttgctttctggctttgatttgttctccgacctttgacgattgtggccaagccattgtattgatagcatcacatatttgggatagacaacggccgactgcatatgagtcgtgctgtgttgcatacaggttatgttaactcaagtctgtctttcacgaagcatgaagtgtacacaagaaataaattattagtgaataagaaccggtcattgaccatcaagacattatcatacatctccatcattctttaaacgacataccttctatcccagtaatgttcatctccaactctggcagatatagctcaggcatggcagaaacatcttccttcctatcaaaatcaacaaaatctccctcgaaattactttcactctcactctcactcccagcatgaccaaacccgaaatcaaattccgaaaccgattccgcaaccgaaacagatcccgactccaccggagccgaagacacaacagaagcactctcccccacttcccgaacaacctccaacttccgattattattcccctctttatgactctcgtccctatgagtctccctatgacccccctcctcccgtttctccttaacacaatgcaaaaccaacagcccatccccactcccaccccccttcttcgtaatcgcatccgcaaaacccttccgaaccctccccgccagcggcctcctcgcaccctcgagatcaagcatagcgcgcacaaccagcaacatccgcggcacagcccagaacgcgcgatcggagcgtcgatcccgccgacagcgtttcagcgcgtcgccctccagtcgcgaaatccacgactggatctgcacggcgttgcgctcgaggtggaatgaggcatctgctatcccgccgccgcgaccggcggagcggttgcgggcgctgcggtggccgctgaaggaggcgagggtgcgtttgtgtaggattgttaggatgtcgagggttgttgctgctagggagaagatgtcggctggggagttggggtttggggggtgggtgtggttgtggttgtgggaatgtgggagggatggcgtggatgtggagtggcggagggaggttggggatgttagggatgaggtgttggaggaggaggaggttgaggtggacattattgagggggtgttctttgttcggcgcgcccagaaggatgagatgcggtggcggggggttgcttgcggtgaggtggcggttgcgtctgtgtgggttgaggacgctgctgaggagacttcggaggaggatgaggaggaggagaaggcgaaggagaagcgggagggggagcctgagcggccgatgcggatggctgttccttttgaggaggaggagtttggtctggtgtggtttggagacgcggcgcggctttcgttcagtggggggagcgttagacgggttggtctttgtctgcgcttggtacgtcctcctgaggggaggagggttttggcgggctgcactggctttaggatcaccggggctgtgggacgggtccagcgctctggggcagagtagttgtatgcctcgaggtcgttgacatgtggcggggtcaggagggagtcgagtgcttggaactggccgaggcagatgtggtagtctgcgtcgacgaagatgttggatgggcggattgcgccgtgggcgtagccgcgggcgtgcagccagcagactgccgaggcaaggcaatgcggccaggtgattaggatctggcgacgttgttctttctctagccgtttgaaggccaggggctcgtcggtgaggaatcggtataggttccgatctgccgtggcgccggtgaaaaggacagagacgctgtcgtctttcagatatgaagcgtagacggagacgagatgctcgtgtgacagtctcttcaagctgcggatctcggcgagaacctcgtcagaggagaagaaatgcggtgcgccgccgacctgcacttgggttcgcatgtagactcgacagacagggccggcgagaactactctgtccactgtatcatcacgcccgtgtatcccgctgctggtgttggtgcggaccgcctcgacgggcacgccctcattctcggtatagacgacatgttctccctccgctataccacggactaagaatcgccactgcgcatgaaagaaactggtctcgagagcgacgtcgtctccatctggggaaaggtgtagtaaatcgacactatgctcggcgatgggtagatcatcgtcgtcgcacgactcgtcgacgagcgcgaagatgcgatcgggaataccaatagcgtcgaggatcataaaaacacggccggctttggtgaggatccattccatgtaggtctcgctggtcaagccctcgccccagtccgggagctcgaagagacgcgggatgttctccggccgcagacgactgatgatgtactttttgtcgagggtggatttgatgcgctcctcgggccaccatagtgaagtttcattctgagacatactggccctgcagaaagcgtttgccgatcaacataacggggagaccctgttaatataacggaccatgtcactctggacaaagcggctgtcaaagaacatgtttccacctcaaccgtagaaaggtgtccggaataaaggacggctactggtggagggcttatcttgcaaggagatgggcaatgtccgatcaatagccccggggcatcaaatggtgtctgttttagagttgacttttcaatgcaaagaccaaattattaaagacaatccatcgcactatgtaacttgttccatgtaaagccgtcgctcagccaatctagggccccaggcttatctttgcgcggttccaaggttaccataagataagcgatcatcgcatggcaactgtcatatgcgctgctatagatctattacggggggcaactgcggcttcgcaaggagagattcaataattgtcactgttcaggggaacctgatccataatatgcaccccggatgtatcccccctatgtatccgagcgatcattgcggagagctcgaatgtgatccattgatacacctaccgcgaggattacatcatatgtttctttcaggtcaggacctcctgcacggaatcagccatggaaattggtggcgttcgataataatgccattgacaagcgtagatagccatcttgccgtcaggaaccgaagtcagcacgagcccggcagccccgaccgtttggcgccccacaatctcattttgcacgtcgccctgacccggactgccgggaaggattggatcaacatggaccggggtattctggatgaggatgtaatcagcgtaggctagcgcggataactgcacgagggggagtctgatgaacgacgggtcgattcaggacttcagccgatcaccgaagatagtgggcatgccgtggagactgaaacacgttcctgaataggatggatagccccgttatttttgcaaatacagttgaggtctgaagagccgagaatgcttgcgtgtcgtgagctaggactctgtcagattggcgggcggtcccggatgtgattgatgatattgagaagtatcctagagctatttcggaggacaccgtgattgtacttaaggtctaatttcggcgttagaaatagaatatgtgacacaagtacggagtagttgttgatagacacctccctccagtgtgttgttacttgtgtgctcgtgacttgcatgaaggcggtgaagggggttgtcggcagaatcgtgtcttgaaaggagaacccaattaggaaagtgcaacctacgagcatccagacttgtgaatatcctacaaggacactaagtgtacccagaatgctttaatcttttgggtcttacgtttaccgatgtcaaacagaagccttgggctatctggacaactcaatgccacataatggtacatattaaggggactctatgacttgatatcttgaaatgagaaggtaggacaataggtaaatgcttgaatctactctttttgttactctcatagccttagtctctatgactgcaggactagctgtctgcaacgagagaacatcagagcagaatgtcgtaccttctttctttggcaaacacctgatcgctccttcccatttcgccatggacatctcgcccatcactctcagctgaactttcccctccttctctccttctctcctcatctcatctcatacttctcaccttctagggacatccacgggaatcaaagtcatccccattatgattgttgtcaccggtggtgccggctttgtcggttcaaacatcgtcaaggagctgaatagtcgtggcgtgaccaatatcgtggttgtcgatgacatgactgatggatccaagttccgcaacctggtcaactgcaaagtggccgactacatcgatgcaactgccttccgtgaagcgattcggaccaaagccttccatcatcgtccccgcgttattttccactatggtgaaaactcgtcaaataacggtagcaacggtaagaaaatgctggaggcaaacttcacctactccaaggaactcttccattggtgcaaggaccagggggtccgcctcatctacgcctcgtccgctgccgtttatggaaataacaccaccttcgccgaggaagacttccaggaagcccctctaaatgtatacggatactcaaagatgttattcgatcagtatgtcgtcaagaacactgacatccgctccccacaagtcgcgggactccgtctcttcagtgtttatggacccggagaacagtaccaaagttcaatccctagcactgtctttcagttttacgaaaaacgcaaatctttcaaggcaattgagctgttcggagaatacgccggggtcgaggctggccaacagaagcgtgatttcgtccacgtacaggacgtcgcgcgcctgaattgttggttccttgaccaccctgagatcagtggtatttacaatgtcggcactggtgtggccagcagcttccacgatgtcgccaccgaggtcgccagcaacttcggcaatccagagggctatatcaagttcatttccttcccagccgaattgaaaggcaaatacccgagctacgcctgcgccgatatctcgaagctccgtcgggccggctccgtgctgtgtttccgcggcatcgaggaagggattcgggattacctggagtggcttgaaagtcctgaggggttgctccgctaatccttgcacccaacatgacactcgagtatcttcgggaggtcatttttttattctttgaggacactctattcttcgaaacggcacgcggccgtcatttgctcctgtttgtagaaatctcttcatatctgggtacgctaaatatatttattaacatcgcctgaggatttatttaacaagacaaaggaaaggatatgacccagaatgaaagaatgaaatattcaacctgttgagttcatacctggattgagctgtggaacaaagacaaactaggtagtcataccttccatagtggaacagagattttcaaaaaactactttgctagagaagaaaataaataaacaggacatctttcagaaaaaggcgatgtttatcgcgttcaattagggagtgaataaatagaatacaaagcagtccattaggacagatgatctaagtcaattcccagctaaagtcctgtccacccgaagcaggccgaaccactacagagccgggaagacaaataaggacgaaggaaaaacacaaaacactgtgtactgtgcatatttgtagtcacaagagacaaggaaagtaaaaccacgaggtcctcgcggtgtggtagtctgctgtcaaaacgcatctacatcatcaagccgaagaaagcagcgagagaagccaacagcaggctggaagcgaccgacacgctcgaagccgcgttgaagatcggagacgcgctgggcgagacgactccactggcgctgcgactggcgtacgcgtacccgctcgaagtagcccatgttgcggatgcgggcgcgggaacaacaccggtgtttgccggggaagtgccgctcggagcagccgggaccagaccgatggtcggcacagcaccggcggtggagccggtgtttgtgacgaagctgacctgcgggacggtgacggtgtaggtcgagtaggtgattgtggtgacggggagggcgggggcggaggtgatggggatgacgacgctggcgggggcagtcacagtggcgccggtgacaccggctgcggatgcggggacggacggagcaactgtcgggatcagggtgattgttgatgggatggcggttacgatgcctgggttctgggggacccaggtggcgcagataccggtaaagtaggagagggcggattggatctcggacttcgaggcaccccaggcttggatgcaggagatgactttgctggtgaactcgctgttggggcagaagcaggaggcgtcgctgttggatgtgcacttgggcgcgagcgagagccaggtgttgatgcactggggtacggtgttggggcagggagcggagggagcggggctcgatactggggacacgccgctggggactacggatgtagattgactctcggtggcagcggtggcggtagtcgcgatggttgcgacggaggtgagggtcactgtggaaactgtgctggatgtggtcacgaaggtggaggagcccgaggtgacggtgttggtcacggggcaggtggtctcggtcacataagtcacaacggtggtagtggcaccctcgggaatggtgggtgtggagttggcactggtgacagcgggagcagtggtggcagcgacacctgtctcagagggagccggggtgcttcccgcagcgacagagctggggaggttggaagtcgaggtcaaggtaacagttgaaaccgtgctggatgtggtgacaaaagtcgacgacccagaagtgacagtggcagtcacaggacaggtggtctcagttacataagttacaaccgtggcagtcgatccttggggaatagcaggtgtcgtctcagcgctcacgccggtgggaaccaagctagtgacatcggagccggtggggaggggactggaggcctctgcagacgaagaagagacagggcttgatccctcggaagttccagatgggaccaggctcgaagctccaggtgtatcagatgaaccagtgctggaaacgacaatgatcgagacaccgggggtaccagacggggcaacagtgctctgaccagcaacggaggtggcggtagcggagcagtcggtgcagatcgtagagacactagtcatagtaacggttgaaatggtgcttgaggtagtcacgaaagtggagctaccagaggtaaccgtgttagtcaccgggcaagtagtcacagtctcccaagtaacgacagtagtagtggcctctccaggggcgaggggagtaccagcaggggacgagacagcggaggtcacgctgggagccgagggggttccggccgaagttccactggcgggaggtgatccagccgaggagctcacgggcgagacccctgttgggactgcagacagaggtgtggaaccgacttcagctgtggtagtctcggtgacgggacggacagtggttgaaacagggattgtcgaagtcaccaccgtagtcgagtgtgctgggcagttggtaacagtcggagcacagctagtgatagtaaccaaactggtggtatacacggttgaggtagtcatctggaccggagtggtgatcaccggggttgaagcggctgaagttccaacaggggtctcgcccggagcggatgaaacagaagaggccggaatcgaagatgtagggacggatgtgccactgggaacaccaggaataccagccgatgagctgacaggggaaacaccgctcgggcttgggactgcggacagaggtgtggagccgacggcacctgtggtagtctcagtgacgggacagacagtggttgaaatagggattgtcgaagtcaccactgtagtcgagtctgctggacaattggtaacagtcggggcacagctagtgatagtaaccaaactggtggtatacacggtcgacgtagtcatctggactggggtggtgatcaccggggtcgaagtggcagaagttacatcaggggtctcgcctgcagtggaggaaatagcagaagaaggcaagatcgaagatccaggaacggatgtaccactagcaatgccaggaataccagccgatgagctgactggggaaacaccgctcgggctagatacagcaggcacagagagcgagcttgtagcggtagcagtagtctcagtaacggggcagaccgtggtggaaagagcgatagttgaagttaccacaacggtagatccagctgggcaattggtgacagtcggagcacagctagtgatagtgaccaaactagtggtgaacacagtcgaggtagtcatctgaacaggtgtgctcactgccggagtggtgactggagacacagcagagcctggggtagagcctgggacagagagcgaaggcacagcggtagagctggtgacagcagagcctgggacagagagcgaaggcacgacgatagaactggagacagaagtctgttcagatggaactctggtaatagcagaagtactggaaacgacaggcgcagtggttgtggaaccaggagtgcagtcgaagccaacgctgtagatgcccaaaccgcagctctcatgctcactatcgtcgggcagctcgaagtgaacagacgtagcaccaccacactggtcgttgctgaccacggtaccagcggagttgcaggaagcggtgttcttgcaagtcgatccatcgggcatgctgtagatgatgtgcaagtcggtatccttatcggtagcaacgtggaagttggtcacagagaagccgctctcatccgagccacaggagaacgacggagccgacgaggaggagctagaagagctagaggagccggagccactggagctgtgggagctggagccactggagccactggagccactggagctggaggagctagaggagctacctttggagacggtaccggagatacatttctgggtctatagcatggtcagtatgtgcagataaagagaggcatgcattactcacgccacgcttgccaaggctagaaccgaagccattgccgcaagtgaaacccgaaaaggaaaagccaccatagctggagaaagagccaggagcgagatcagtccagctgaagcccttttgctgggagtcgttacacttgttaggcgatctacccgggctagagtagcatttctcggagccccaggactaaagaatttcgagttaggatggatatcagagacgacaaatatcagttgaggcataccgctccggtggcctggccagaggccagaagggataaaaacacaatagcggatgtgaccttcatagtgggaggatatccgtaacgagtgaaagtgggacgcgaaagatcgaatggaaggaaaaaagaagagagaagacgtatgaaagaaacaaagatggactgatgtagactggataggctgcgatatagaaagctaggtctcaatagatatcgtgatataagccacaattgtataggcagcaaaccaggcaattcctattagtattgttgatgggtgacaataagaaaaaaaacctcaatgagattgggtcaatatcaaacgaaagaaagacaaggaaatgcgtatccctgaacgagcgtctttggttggagacgaaccaatatggataaagatccaaaagaaaatgaaacaatgacgagaatgaaagaagtcaaggatctgggcagggtcgcggtctttaaacaattgtccaaccaggccattccataaacttctgcaggcaaagggtctggctgcagctagcgagccttcctctgttgacccgaagtctggcgccaaggaccctggtaagacattttgtctgaaaaaaacccccatctctccaatcggcagaaatctggaggcacagatgaaactgtagtggctgaaaggagggtgggcttgggatccatccagagcttggcgccgattggtatagacgtgcagaagctggagaagagccagtcaggggtcgaccaaggcgcttgccggggggtccgatcccactcagcatcagttcatccagatgtgcctgtgagatcagtcgacattaattgaccaataagcatgacggagtaaaaataggttctgaataggcgcttgatcggcagggagaacttgcataggccgagcgttgacaggaggggtcttcagggtaaacagtccacgtgcacttggagtctttcatctcccccaaggctcttggactgaaactcgctattttcgactagttgaggttaaagatttagttcaaaatcaaataatgggagataagaaaaagaaagaacttggcgtctcgcccatgcacccactttctgcgtcactgcccacatatttgcttattattgatcttcatgatcttctgtatacaagctctttgcatctcgaagcgccagggtccacaaatcagagaatgtctatgcatatggagtattactggggtcagggactgctcgtgtcttaccggatcgacttttcttttcttttctatctcgggtcccaggggtaaacccctggaaggtcgaacggccaggtacccgaacgctccgtctcgcctttcgcttctcggtttatgtggatccgactaaaaaggcccagcgccaaacctgtcagaatatactagtggcgttgtttaaaccgaggggttcctgttcctgttcctgttcctgtttctaagcgtctcacttctgggctggatgtaaccgataccattcctatcatccgatctgaattcgaatacgtactattcaagataggtttaacttagccactacggagtacttcttcctgaactaactatatacctcggctttgaggggtataagtgtcgaattccctattgctttcaaccatgtcctaccgcattggccttctattttctctttaaatttcttgaaatggaaacagaaatgcaaatcgtccccgtctctcggcgcgtcggacgatgcctttgtctggcttaagtccgggtaacatgaaacgggcaactaaaaatacccacgaatgagacttttagcgccgcatggagaatgctacgccgtgcctccctcggaatcgtcggagtctagacgtcaagtctaggtcttaacattaatatattaacctcggggttactttgcaaattcggcaaccatgtgcgcccgggttgcatttttagtgatttcgtgcccaggcagtgtgcgttcaatgtcaaggcttatctggacatcctatttatgtctagctactccgtactcagtacggagtactccgcgtttaatcaggggcaagaaaaccgaaaaaccgacgactcggtactgtttgcagttatattcaactctacttgtcgttccatagatccctagcttcttactatcagcttattatcccgttggtggaacaacattgtaaatgtctgcggactactgagtagcgggtttcactagaaaaagtggcgtttacttccaggaccgaagccgtgttggagtatgtcgtacagatatattttgagtttagaagtagagcttctttagggtcgtttgtggcttccctaaatttagaaccaatactaagatagtagcgagattgaagattgggaaaccataatatcaacaactgtaaggttgttttatctttatcgacccattattccttcaaaattctcacgagccttctgccccaggatcttttctttgccttgtccggatcttcaatcacccagttgagcctatccgggaaattaatgtcatccaatgataccctaaaaaagttgaatgtaagtatcgagtcttgctttgatatgaagcaacgactgaccatttagtctcgaaccaccatttatatccaaaaaacatgaggaaaaataccggaatactaatatatgacgcgataaacaacgaatagttgaacggtgtctcaaataccgtgaaaccttggatcagcaataggaaaatattgaagaagaagttaccccagtagatcgaaatgtggcccggcgctgtatagggaaattctttggcgtcgatccctttcctcttcgcagcgccacgaactctcagatgaacaaatgtgatcgaagcccatgcgatgtaggccgcagttccaccgaaagaggtgaagtaggaaaacagactccctgccgttgtttgcaaggacatcaggcctaggaagccccacatatttgagaaaataattgccgggtatggcactgcacacaatattagttgttaccagagagaggatagaagaggaaattgtcttaccccccctagtgtttgtgattgcaaagcacgagggagctttgcgtttcaacgcgagagagtaaagtgtgcgtgattggatgtagatcactccattcgcagcggaaatgaaggcaattataataatcgcattgacgaaatgcccggaagacttccacccagcaagtacaaaaccaatagtgaacggggatgatgccgttgtcgacgatggatgcaccagatcatccgatgttgacggacaaatcaggccttggaaaaacgacatgccaacaaacacgaccaagatacgatagaggatagaattggtggcctaaacaaagtcagcatcagattcactttaaatgtcaccgatttaggggatgcacgcacacgaggaacgtctcgttgggggttcttggactctcccgcggcgacagaaacaatctcagttccaacatagtatgcggcggccagaacaaatacttgaccaaatccattgattccatttcggattgggcctggcagaatgtcagacctgcgaatcaattcgtgtgcgagaatactcaccgtatggctctttccagtacctgaatccgacatacccattaccaaacgcaccagtatcggcaagaattgagataaaaaatagcacaatgagtgacaggaacttaaacatgccaaagtagtattcagtctccccgtagaagttcaccccaagggtggttagaatggagaaaaagacaaagaataagatgtaccaagcccagacggggatcgtggtatcgggaatccagaattgaaggaagactgtggcattattccaatctttgaagttgatgagtgcaggccatttcttgcttgttgatgacactcacctgatgcaagaaatacactccacataaaatagtaaagccaagatactgcaaagctgagggctggatctacgaatcgatcacagtgctatatgaaacaggttagcaaaatttccagcaggttgagattggagttacttacttctacaaacccgccgtgaacaggaaagagcgtggcaacctctccaacactctgcatcaaaatccacatcgaagcacctgggccatgtcaactttgtgagaaatatgctttgcaatgctaccaactcacccacaacagaaaatccaatcaggagacccaatggaccagcttcgtagatcccatagcccaagccataaaagcaacccggtccaatgatactccctagggcaattatcacaaattgacggcccttaagcccccggcgtaggccatcctcgatgatgtcgccagaaatgtcgcgatggggttcatcgctctcttgaacttcggtgacagacggctttttcgatgtatcggcttttgtctgcggtaatgagaagtctgccattttgaaagacagccctagagtgattgatcgtgcaaaagaccgaggactgaccagggggtctgttttatagccttggaatcctccacatttattgattggagcttgaactgagcatttcggctaactcgtttagattgcttgaaccaaatgctaagctaaagctaataattgcttgtcgtggccaaatattctaccagtgagatgtttacttatatatcacgccattgaggagtacaattcgtagatatatttcggactatattccggcagataacaacagtgtaatttcacttccaagttcctcgacttcgaaaacaacagaccaactggggaacttttcacgagaaattgaactagaaaatcgaataagcaacaagcagggaggaatttggtatatcgaaaaattttcagttgccaaaagcgcctgttgtgtgaacgcgtagcgtcatcgaacatgagaatgacgggactttcaacgcgatgcaggcttgtggagcgttttgattttcattttcggagaattgtcctcatctatctcgagtttcatctattccaacatctcagcgcacagaatatgaagttttcatcgtcgagtgatcatgcaagtaacttcccgaccttggttggaggtaacaacggcagtttcacgcaacccggcacatcgttttgattccagtaggcaatcccatgtcgaagccaaccggcatatgtgccgggcacagtatccgacccgggattgtcctgccacagcgagccgagcgtgaccttgttgacgcgcagaatgaggccatgagccagcttgaacccatagctgcgcgacaaacaagcctcaacaatctcacgagccttctgttgctcgccagactcttgtttcccctcttttggcatggatagcgacaacagatcgaatgcctcctggccgttccaagcagttaactcgttgatgagctgcgacccttccatgaactcgatcgcatagaaatgtgccacgcagtaggcagggccattccagtcatcttcggcatcaaccaatcccattaccgcactcgccacttgaccttggataatatagtcggtcaacaggcgactgacctcggtggggccaatgaaagtcccatcctcttcagtgatcgtaaactcgccgcccatgagaggaactccttgaagtagcgggctagcgtacattccatccgtgctcgtcttgcccccatccgcggcccagagagcgaggagtagacgatggcagcgcgcaaaaagcgcattgttgggcaatgcggcgaggaaataattacatagactgtaatgatcctcgccactgggggtataagatagaacttcatacggggaatcggggttcgcgattgtcttgtgccagagcgtatccagatctccaatttgcatcatacccacgtccgcgtagacacctccatatcgcaacagcaacggccagcaaacaaggtctgaagtatgttgtagtgcgtaagggccagtgagagtctcgtcggcaaaggcgcgtgggaaaagtgttggatcggtaacatccaggaactcgacgatgttgctttttgaaccgggttgtcggtcaacgatccgtattgtccatccttgctttgtgaatcggcggtgccatgcgcgtacattgcgctgtgtgtaagggtgcatgttgatgtagcccgagtgccagaagaaccatatatttttgacgctggttagcggctggggatgcaacaggtcaaagtctatatcggcgtcggagcgtagatcgagaagcccagcggggatagcgtgcatcccggacggaataagatgttccattggagaaaagaaggtagaattagaagttgaggttgtgtttagtgcgagcatgccacaattattgattgacagtgtgctgtcttttatagatccgaaagttcccacagaaggatatcagccaatcacaacgaaatgatccgatgtgagcaatgatgagtcaagccctcgggactcccgaggtcccctatatccactgaagaactttctgggctcctgaggtctggttgtagaaattcccgtctggggatttgtctgtccacctgcctggacatacctattgtttggctgtacaaacttattgtgaaaaactccgctttcgattgcacacttcgacaaaagctataattcttcattctccgaggccgcacatcaatcagggcaaggaatgataagtcaacaaaaacgggaagaaagtatgcgcatggtagctgaggctacggagaacatgagtctcatgaatcacggctggtgcttgagctgcaagcgctgagggttggcgtggcagtgtcagtaatgtcgagatagtggtcggggtcgaaatcaaggatttttggtaatattacgcacgtcaagtgtttatatctataacccaaggtagggtttcataaaacttgcggaccttggtagatatcgcttgaataaggtttaggtgggtccggggttgtgggttctacatcatgaaggtcggagcttcatgagaggacggagacctattgattaatgagggccagcgagagaatatgataaaatatttcgaatgtttttgatattggtaaagataaatgtaaacagcaactcaaacagccataactcgttagagcgcaaacccacaagtttttaactccaaaggtatcaccagccccccccacaggggggggggaaaaannnnnnnnnnnnnnnnnnnnnnnnnnnnnnnnnnnnnnnnnnnnnnnnnnnnnnnnnnnnnnnnnnnnnnnnnnnnnnnnnnnnnnnnnnnnnnnnnnnnnnnnnnnnnnnnnnnnnnnnnnnnnnnnnnnnnnnnnnnnnnnnnnnnnnnnnnnnnnnnnnnnnnnnnnnnnnnnnnnnnnnnnnnnnnnnnnnnnnnnnnnnnnnnnnnnnnnnnnnnnnnnnnnnnnnnnnnnnnnnnnnnnnnnnnnnnnnnnnnnnnnnnnnnnnnnnnnnnnnnnnnnnnnnnnnnnnnnnnnnnnnnnnnnnnnnnnnnnnnnnnnnnnnnnnnnnnnnnnnnnnnnnnnnnnnnnnnnnnnnnnnnnnnnnnnnnnnnnnnnnnnnnnnnnnnnnnnnnnnnnnnnnnnnnnnnnnnnnnnnnnnnnnnncaccagcccccgcaacaggcgggggagaaaaatggccagtcaatagatatgacatatgaaatgaaaaaaggaaatgaaagattggtcagataatcaaatatcaaaatggatcgcttttgggttctgagaaccaacatcgatctttcgcaagccaactcaatatgcatggcaaatcgaactcaatcattagaaaggtagactggtctcaacgacacgtcagtggcaatatgcaatacaaccagagcgaagaacatgtgtgctcaacgcgaggtcaagagggtgaaggcacaagacactaatagtcgagtctgccaagcgactagaaacaggtaggataaattgtggccgtggttatcatatgatccttggaaatccaagagtcgtgcaatcgtgatacctcagagaggcgcggggatggggagctgagagcgacgttgctgagcatccatcagcttgcgtcgcacagcctcaccacctgcaatgctgctcgatttgcgcttgcgggtgggagttcgctggtcgttgttcttggcgtgccggaagacactggcaggacgagcgggagagtttgcgggcatgaactcgcggtgctggggaaggcggaggagcgcctggtagcggttatggttgcgacggaaggcagtaacaatacccttgtcgagatgattgaggaagcgctcttcgctattggcgggttgcgacgcagactggcgggtgggagtaggtgtacccatggacttgccgaaaggaggggccattggggacatgatatcgtcatcaaattgcttatccatgtcctcatcttcatcggaggatccattaccaaagtcgatgaagtcgtcgacgttgagagcagactcggggtcatcttcttcatcttcttcgaacgaactgtcgatggtgaagtcctgagaagggtagaatgcctcagggggacccatgacctggcctcccggggtgagatcgttgccgagagcggtcatcatgaggttggcactcgaagccagcattgggctgaaatccatctgattgggcgaggcgagtgcatcggtgtcgctctcatcaaccaagtgaagtgtagtctggcgagggctagtgttcgcagttccgggcatgctggtggcggcggattccagccagtcgtgacgagacgaggcatacgcggggataatcacgagatgcttgccagtgcaatcgaccaaagctactggcttgtgggggtctgcgacgaaggttcccatgatgggcccgcggcggcggggaatacattcactcttctcgtccacaggagccaaagagtcagaggagtcccggcggagaagggatcgagggtgggtgatggttgctggcggagggagatcttcgtctgtagtgtcaccatcatcgccttttcaaaggggttagcaaaagcaaaacacaatacgaatgaccgattatcatactctcgtaaccactcaagctggcctcggaggatccgtcggactcgacatggtagatgcttccatggccataatcggcgtcgccaaacatctcttccgattgccggcgggtatttctctggtagttttcattgtcgttttcgatcatacgacgcaattgtgggtccaggctgtcctgctgcaagaagtcgccgggtatatcgtcgtcactgtgggaatcactatcggaggacgaatcggatcgctcctcgaagtgaactcgccgggtgactggcgtctcaacggcttcactggtcacctcaggctctccaaaggtgtccatggcactgtagaggtgctcttcatcgaagaatgaagcagcaggtaggaacatgtggtcgtcgaacgagttgatagcccacccatcatcgtcaaatccagagctgggcaaaggccggttggttttctcagactccacaataatcatttcttccaacttctcgacgtcttggtcttcatcttcggcatctgtgatgtagtctacaccggcatagacatcatctgagctatcatccgagtcattggcgtcaatgtcatcattgccatcactgctgtcgctgctatcatcgtccaggacgcgtcttctcttgttgactgcgggttggcgccccgccttattgtcgcgacgacgaccataagacggggcccggactgctggttcttgttcatcgtctgcatcttcttctgaatcatctgcctcatcgctcaggtcctcgagggacgagaccgaagagacactcgagaccgatgatgatgaagctctccgtttcctatcggatggctgagcattggctacctttcgctgattggccttcggcgacgaatcgagattccgcatgatattggacttgggggttgaggggcgggggtgagagttcttggcggagctcttgggagcccgcttggaggagtatgagctctgcggcattttgtaatagacacgtatgaatggagaggggttgttttgttcttgtggacttgtatggtccttgttttttgttgttcaaatggtccggtccgtttcaggaggatccagtgataggatgaaggaagagggggtagatcttccttagttgagaggattgttgtagtttattccagaagagtaatccgtgcagggataagtcgaagagagattcgaagggaggtgggacggagtggaggagatcggagcggagtggagggggaggagtccacgggggggggtttcttttttcgtagccactaaagcacccgcagtccgttgcggacgctgtagtgctccttctgggagtttgctgaggggcaattccaacgccttcacacgaggcgtcgaaagagtaacaaatatcgtcaagtagaattgaagatcggagctgcaggactggggagccggcagggacaggctccccagcgaggcatttacagctcaacgaaggccatttggctgattcttgacgatatgtggtggatatgtagtaagtgtattaagatggggttcaataagttcaggagagtccgaagtagatcagttgcgagtgctatgggaaagggaagaagaagagcaggtcatttttttcccccaagtgggagacacttgtgattggctgcagaatacgaccgcctattcgttggcgccgctcaccgactctttcgcgccaatcagcgaccgccgaaagttgcaacgggaaagtcatgaatttgatctccaccaggccatttacttaaaattagatggttgcattgacattatattgggcattgggccctattgctactgatgttgtgcagtactggcatctcttcgatccactgctatctggggccttggaggaacatatcccggcaggtcgagtccaaacaaaacaaacctaacacgtcattcaacctcctcggcattctccccggaaaaatcccatggcgaaccatcccagtcaacgcaaaatacaaacccatacaggttgactcgagtttcgactcggcactggcagaaacggcatatcagaatcctagtctgcacggtcatcaaactagaatagccacggtgcaacgattgacccgtgcggtatggcgtgcatgatgattcatcctcggaccaggagacttttcatcgatgacacatctcgcgatgaatcatattgtttcgtatttggacttcacgatgacccgaattttcactgtgaggccacgggctaattggttcgaaccagagatccggccacttttacgttttgagtggcaaagcgctctactcttttccgacccgcttggccattttgcccgtcttccaagccgggaacctgcaggcctttttctttttttcttttcgcccaaaggtctaaatgcctaactggcctaaagatgatcagaggcggtaaaaggacagcatggccgaggctgggcgcgtctaacatgcatgagataggtccattgctctcttatctttgtcggtgaggggtcaattgtatagcccattacagttgtaacgtacacaatgcatgttctaccataacattgcggatataaaagaagtttcagatattttatatagaaaagtaaagaccatatttatgaaagagatatatatagaaacatcaacgttctaccacttggagaatactcaatatttcatcctaatatattaatagtaaataaaatagacctcctttagactatatatcccctactatatcttttgtaagtattcctacaagtgacaaaatctctatttcatgtttatgtaccttttgtatgggcataccatataaaagatacctaaaaagagaaatctctcgtttggtgagaaactctcgttatgtgggacagacccatacctggtacaggtatgggggcggtaagacggctatcttgtaatatcgatcgtcttcgcgactgctaagcccttatatttctccgtgagatatcgcccgatcaagtggtggtcgaataatttcgattataacgaagataaactcggctagccactagtacaatgctcatgaaaccttttcttctgctagaggcgctcgtcttacgggtggtcagcgggcatctgatcatgatgtcgcctgagccctacagcaacaaaaccctcaacaactctcctcttgccaacaacgggagtgattttccctgcaaattacgagatgatgcatttgcggcccctgcgaaagagactgtttacgaggttcatgggaagtgcaatccacgggggcggatcatgccagttgagcctcactgaagacctcgcgccatccaaagaaagcatatggaaggtcatcaagtcttatgaaggcggctgtcctgcaaatgtagaaggaggtctaagcggagacgccaatgctgacaatggcattcaactcgatttcgcgatacctgaagatatccactccgggaagtatactttggcctggatatggttcaatcatattggagatcgtgagatgtatatgaactgtgcactaattaccgtcgacagtccttcattgcctgtgttcaaccagagcatatagaaccaagcgcaggattatctacctatgttcatcgccaatataaatggctgtatgactccacaaaatttggatatccgattccctcagcctgggaagaatgttgaactcaatggtctggcgcgtaatattcttcctgacggtcaactagtatgcaccggaactcctgaatttggtgactcagtagccatggacccgattgttctagatcttgaaaagggtaatcattggaaggctattttatactccccgccacttctctagttagcattcagccgttaccttgctcctgtcgtgcttcccgccgtaatacaagccatcaatgatacctatctttggcattcgcggcacaattaaactggacaagtggtttaatatgaaggtcattgattgagcaaagcattggggattgaaatatgcatgaaaatttgataaatcattgaaaaggtcttcgccatactttggagttttaaattctcgagttcggtactgtactctgttgtattacgactgctttttggcaatggtaattcattgataacaagtatcataaaaggatgcaacaaaatttgtagaataacccagccacaaacgagttaatcgcacagacaatgccactctgcaaaaattgggatgaagatagaagagccgccgtacttacagtggatttcgaaaacagattttcctccagacatacacgtttaatatccagagactcactttggcccctagtccgagtcgtccgggctctagattgtcccgtagccaatagtaagacgtgattcccacgggaaggggctttatatagccagaataatcctaacgcaagatttgtaagggacttggaaagaaagcgtgtgtgtccggggggtaatctattttcgagattctctgtacatcaataggtcaagattggtttgatattgatagccatttgctgactagaacagacggaatccgtcagaataaaagtctaatttccgaagcttcgaaagagtgccaaatgctcctcgaaaggttttgcacgtaaaagcaacgtgtacagtacctggacttgaatgtacacgataactcgatgattggatgaacgtctgttattgaacttgtcttgcgactaattctttatacttaatttccaccagagtaacttctcaattgtcgtggcgtacaatttacacattcagactcctgtgtacactagggacgggactcagagctgaactttgacgtcaattgtttgaaatttgataccctcaagttttgaatagaaaccgaaaatgaaccggaaaattttctaacatttgtgttatgattgcaatgtaagcagcttgccgctagagaaatcgaaagaaaagttgtccaattacgataggcatcgccatccttactgagcaaccagacatgctgctcatctttttgtattcaaaaagctgcctatcatcgacgggctggatgggtcgcattggagaatgatgttcttatatacgatgagaatgagtttcgattcggtgatacacgattttgttcgtcaagttgataagcgatttcaactcttctggacttggcctttgctgaaaaggggttgtctgggacatcggccttgataaattgaagaggagggggccaatcacctgcaggatctctctcaaagggcgttttctaagctgatcaggcagattttcaatctcgacaggccacttatgcgtcgaatgacatttacccatcagcttgattacaatatccgctaaagcgtacagcttcattgtcgcagcatccatttcccaagcacttatctcgcagctgtcctcgatacccactggtgaatggaacggttagtaagaagtctgaaaactggggttaatttgatatgcgtacctatcttgaccttgccagactgagtgaaaaagatggtatgcattgtcaaagtggccagcaccctcccgcattcagccaggtgctgaattccttcgagtatctgttcataatcagcgatcgctcgtattatgatataatatgtaactctacttactggcttgacaattgtaatgatctcactcgccgtgatcacgagcttcgttgccagaatctgggtgacggaaacttctacatgctcctaggccaaaaacaccgaatcatcatgataacagcatccaagtaatgaccggaaaatggggtgagagatgcgattcagcgttcgttgcaatccaaggtcggagaatgcttgcagctccagtttctgcacttggacaaagtctgcctttgtcttccttgtatcgagccagcacatacaatttgatatttgcaatgggttcaagtatgctccatggatcttcatgcaaggctcccgaactcgagcgatatttctcgttatcaagcgttgccgtcttctctttggttctcaacgacttcgggaaagcttgatccactgtagatgtctcggagactgaatcagcttgaaggggcggtgctttactgacctatatggtaggaggtctgcgattatgcttgctggcgctcatacttctaggcgtgcacttccaataagataaacttagaacgtcaggtcatctgggtgaatagaaactcctatcgatgagggaactgagcttcttatatacaagagcaggtacaaagacttgacgttagtcttcatttatcaaccccatctccgccgtaagtcttttgcgtaaagtttttgaggcagcatgcgcgattcaaccttaacgtcaatttgacctcaacacaaagttcatttcagcaaagagctttaacatcaacacctggacctaggtcgctagtcatgtcacactttttttcactaaaagtcagctttgcgtaaataggtgagaaggtttgtactgcgttgacagcgtgatctcaacccgtggttcatcgactcataaatgacgaatcatattcttggtcgttcatactgtatcttcaattgtactttcactgtagcaatctcaaagctcaattagtcctggctttacccatccgtacttctgcgacccaattacagcaaatcttcatcaatgagcgaaaactggtagcaagagtagcagatatcgaatgccttgggtccctgactgctggcgactgggcgaacaactgtgtaagtcatattctcttgcttcgccttttcgaaagccccacctacctccttctcatagcaacgatgggtcttaagtagaaattactggtatggtttaagcacagtccaataaaaatagtagattcgaaagatggacatttttcgtgtcattcactgatcaggccagcggaatttggagtacagtgccaccagacttcccaacacatagcaagccgtccctgcgataggcataactatccacggtcgcttatccccagttttgttcctaggaagttcattcatcatgaggaatgaactaagcaggaaagcgggaattcccatatggctatgtgtgaataagacaactgactcctaggatacgcctacgttgccctttcgtgtatcttttcgttgctacctttgcgtcatcagcccaatctttggtcaatctctgatgacacagcctatgctttccacaagatataaggctcagctttacccttgctttacgttctaacattttcactcacaagaaaggcacctcgtcaatttgaacatgacagaccagaaatcccgatggcacgcgcaaatgtcctctctcagactacaaatagctttggggcattcgctctccgactcagaagagaaaacaacgccagtatctggcccaccaaagaaggggttgctggcatccgctttggatcctgacacatttattgaaaatggaaacacgggaagatctcttgcacactcgccggatgtaagtttcgcctaatgcaaagggctgtggatggggactgacagtatcatgcgattaggctatatctttaacctcccgtgattctctatccgggtgtacagaagaggctagaattgctgtggcgcttacaaatcttctggttcttctactttagcagtggcgacgtactcatttcagtagacgcgtacggatactatggaatttgcacggttttcagaagggtagctttggaactacaaaggagaataatgacgtggcttagtggtactttgtggtacttcatatgattatagatcgacggaagcattgtattccgtcaggctggctggggaaattgaagattttattagtgtgaataatcaggcacattgaacttccctttccattgccaaggttccatgagctctatcttcctcccacacactttttctttctacaaaccacactgcaatgcgatccactcttcagtatcaaaatttgaggaggagtagttgtggcactcatcccatgtcgtgtaagcatcttcgtacccattattgtcacaagtattagtgttgtaagcggtgcagattgcaccattaggaccagtgattcgccacgacagaggcttggtcagggttcccttatcacatgaggtattagagaaacccccatcggtgtaccatccgcaagaaacatcagtgtctgacgaagttgtggttaagtcgttaatgaccaagcacgtgttctgggtggtgtcttcgttgtaacctgaaactacataatagtcaccactacagtctttctcactgtaaatggcgatagaccacgattcggttggagtaggagcggcagtggtagttgatgtcgcttttgtcgtggtagatgtcgcaagtcctgcccatgatgaccagctggagagatagtcatccggatagtcagtctgaacaggccaggaagtcacagttgctatggcggcacttcctgcggctccatccgggtcagtaccgagagcgcaagtacccatagaggcggtccacgatgcgtcatccattgctgtttggttcaaaatctcgccagtgccgttggcataataatcaaagtaaccgggcaccaaatatcttttaacatcaagtggtggcggaggcgccaggggaagatgtggatagatatcgccaagcttgttttggatgaacttggccaaggcaaatagagccatgctgtccgcattttggatcgtccaatccgcgaattgggtttgcacacgcgcaagacccttattcaagtacggtgcgtatgccgtgacccattttggacccgtgtcgtaattgtacttcatcttgatatccgtgacatgagtatttggaccccaaccgtttgctaaggcaacccaatcaatgtgtagaagctcatgcatccacgtggtagcctgattcccattgtagttgttcatatcagcatagatcgccggtgtgaaaccagggtttgcgctttcaagtacggttttgagagtgggttgaccgaagtatggtgggcagaaattgatagcaggggcagaaggctcgtcttgatcactgttgactgtgtatgcaacgatttgggtatcacggccgcatgaacaagccaggtggggatcatcacagcgagccacaattctccagtcccatggcattcctatccacccaggctgaattgtggcaagattcacgtagatatttttgaatctttcccgcaggtgctggttcatagctggtgcgcccagatactcgacggtagctgcctcgttccagtttattttgtcatcatatgcttcgctcatcatgtagttcataatctcccaggattgttgccaccctgagtagatttccttcttctgaagtgggtcacaaccatgccagccaacaagcttggaggcgagtagagtgagattataggtctcaaagttagatgtattgtatccgcttaggctcagagcagccgtaaacgcgtcctccgcggcggtgatgttggaagttgcatcggcttcggcagcagttaggacaaaattagtcaagtccaatgcccactccaccgttccgagaaacccataagaagcatagcggttgatgcgagagctcttagtgctatccttcacacgtccgagccacaggtgatacgccgagtagctgccaatattattggacgccatcaagacccctagggtcgagccggagattagatactaaaggatctaaggcctcaatatgaaatagatcatatgaaatcactacattcttgactaaaaaatcaacagtagttaggtaatatgtctttgatagaagacacccgcggcagcatacactctgaccgaaaatcaaacaaccacccgtcaaggaaggtcaagaaaagggcaatatttcgggttggcgtagaaagttcctcctagcctttcaatcactaagcaacgctcctccatggtacgggcattttgtagcattgctccacctttcttactagcgccctcttttgttgtcttccaaacccacgccccaccatccgaagtccaaccgacccgaacataattgttagacctttcatcaagcatgccggacattccactttcaagccatgctaattcggttggccaccaagtcgggctaagatatcgcactattaggagttagaaatatatagcgtcctaataaaggtattgtttgatgtaacttactacgatcgcaatgtgcattctccttttgttgccagttgggatcggaatttgttggacgccttgtattgttgaatgggtccaattccaggaactctatctccactcggctagagacatcaagcgtatagattccgccttgggagggccatcctttgacagtcacgccaggaccagacgaataatatatccagaactgcggctctcctagaaaccgatcctgaggggtagtccattcgctgctcacttcttggagcagttcctggagcgcgtcctggggcattgtgagtggaatttgaggggcggaaccctccggcttaatttgatagcctagccagccagctgtaactgatatgagcagtgggatcacagcccaccagttcaacatttcccagttttagagagagataagtcagaagggacaatatcagggttctgggatatagatagacgtgtgccctcattaaagaagaaacataaagtttaggcagagatgattgcagcttctcagtgattcaagcaggcaaccgataagtcagcaggtttcgctaagataactctaccgttttgcaggtcgttatgttgaggagatgcggtgttcaatgaaacgtgcgatacagaactccgtgcgtgccggtctcgtattttgttcattactcttggcattgtccggtgtttcaatgtgaaggaccctaagtggggggcgaggctgcagacctcgagagtgaagtggcaaaagatttcctcaccaaaaaaaaaaaaaaaaagggtctcgttaccggagacaagccattctgtctaaactcaatatcaagtagggtttgtccagctcggtggtgaattacgttatagattaacgtggggtagttagtactccgtcaataagttagcgagacaccctaacatacatacaacattcaccctcgaaatgtgtttgattgacataatatgtgacaaaataccatttgcaatcacagaagctgaagcgatctgctagattatataagtcatcggacccccagccgcatcactcatcaccaacagcaccagttcgcataaaaacacccatcagcaatcataggcacaaggccaaagcgatacaaaatgactcggaaccactctatgacttccaatagaggtagcaaagaatacaccagcgtctgcacattttttgtgcagttcctccagtttgcgcatagtctccagggaactctgctgaacctctgaaggaccgtaaccttcaagccccaaggaagtaaggcgtggcagacaatttgactctatcaagcggtcgatttgatcgacggcccacccaagtagctcgttgtggcagtggcacagatacaaagtctcaagggacggcggcaaaatcgccatgagttcttgcgtgggctcaaagtcctcatcaagcttagcaagcattgatatagaaatatgtagatatttcaacatgttgaaatcggcaaacgatcccatccatccctcatcgtcctccgggggttcgtatgattcgccacagagccaaaagccttcaagtgttgtcttgtgaagggagatagattcttgaaggggagccgatacaatctcaggcccatcggagatcattcctccgccaatattcaagcgaaacgtcttgagagccttgcaagattcaatccagacacggaagccacactcagtgttggtcatgtcgagatcaatatcggtgacgtctgagaagggaataatgcgggtttcttcctcttcgcgagcgttgtcgacgatagcgtgtcctccaaccctgcgcatggcggggaatttgaagaacggatccatgaggcttgcatggatggaattttccgtatcataccattccccgaaagcttcaacgaggcgagaaaatgccgtggtatcctctcgtgcagccttcacgaacatccccgtaacatattctgacatatccgggtagcatatgctgattcgtctcaagcctttcagctggggaaggagcaaagccaaccaagcgtcggtgtttccgagacgcagttgttcatgcggttgcttagaccaacaggtaccagcgacaaatccgtcaaggagttccctatcatattcataatcaacgtcgacttcttcattggcgtcctcagtgtcccagtaccctagccgtatagatcgtactgcatttgccagctgcggacgtcgcgcaattgcattgacaagtcgactggcttggccaatagtatgatgggtacaattaccaagaataacccgagagtagagcgctggtagcagaactgtgtacagtcgacgacatgatcgaatcagggaacagcggtcaccctggaaaggcagttcttccgcaatgaggcaaagagcctcctctgggaggtcgagaagcatgaccatgatgtaagtagaaggtttcttgagaaagaaaagagatggtagttgggttcaggttcggcgaggaggttgctgtgtagaatcacgaggtgggggcgataattgtctacagcacttggtaggagacccaaccacggccatagtactccgcatatatactcggtattaagagaatatgagtgttggtgtggtcaccaacacagtgagcgctaagaaaggtgatgcgggatgtttgacagaagaggcaacaagtggagactgccaagagcaactatcaaaagaaagcgcttagctgagcggttcagtgcatgaaatgcgaggtgtatgctcagtgagaccgaatgatattgattaaattaaaataataaaaaatcaacggaataacccgcgaggaggtctcatttagcaatccctggattttgggtcgcccactcaaatccaagattccttggttggtgggatcaacaaccatggttccgatcaacactaaccttagccctagagttggacaaagctcacaaaaggggagatcaagtgccgggataaggagtaacattactaggcatacgctctgttttggcccgaccaaacatagacagacgtgatttcgaccgggttggaactgctggccgcgtactttgttgagtatcttgttgggtttcgctctctacttccgcgggaacagcgaattcgacaggagcggcgcgggcctcctctacctttatcacgcctttgcgtatctcatcggacgaagcgcccggtggtgcggtcgtcgtcaacgtctcagtagggcggattagaccctcggaagtatcttggttgagcttgatgatctcttcctccgtcaccagacgctcattctccaaacggacctcgcgcccgcgtttatggcagtaccacagcacaaagaggaggactggagaatgttagtcagccaaaatactattgcacttggtgtgatgcttcacttactgaacaatgctaaagaccagagcacattcatgcccataaccgccgggaaccgagctcgcagaaacgccatgatggatcgcagcatgcctacgagagcagcgggtttcgacacaagttcttttagacttggcactcccattttttctgcaaccgcagcagccttgcccacgttctccacattgattccactcttaacggcacggtcggcagcaaccgccagcatctctggagccaaggtttcagtccaacgctcaggaagtttctcgatcaatttttgcatgggactaggcagcttcgtataggtgtcttgtagttggcgattgccgttcgtcagcagcatctccaagtcgtgataggcagttgggactccattgatcagatccttgaagatgagcttgaacttgcgtaaaagctcctgtgtctcctcactgatcgaaaacacacggttgttatccgctgccagattcaatcgctccaaaatatctgtcacgtcgtcggcgtcgttatctttttctgcgttcttcccgtttgttgacttatccgatgtggtcggaggagtcccggcttcggtctgtgatttgttcgcatcgtcggtgtctttgtcctatttgcgcgaactcagatgttagtacacactcaaaccagatgcaaggatccgaaaatgaacacgattaaataaatgaccaaccttctctgtgcttttcttccaaaacatggcactccatcgtttcttcttaggtggaggcttcgagacttccgatttcggtgtctccgttcttgtcaatgtttgctgggaactcttccgttcttgcctaccctcctcgccaagctcctttgcaaactcctccccaggcgaggtaggtagagggatgttttcggctggttcgcttatcgcaggttggagggacgccccagtaggactttcggttggtgtttgtttattctgctctgttggaggggtaacagattcaggctcggcggtgacttcgcgtaggtaggcttcatcttcaggcgtcaggacaggcttgggcgcggtgatcatctgtgacgaacgccgtcggtgttttatttggttgaaatactgcatagccataatggagggtgtcaagataccaaggacggcagtacgagcttttatttcctgttcctcgatgagaggtgcgataggaacaaagcaagctgaaacgaggcgggcgcgtgctgaatgtaaggggaagcgcgcgctgtagattgtagtgatagatcaactttcccaagtggctacatgatatgtcagatgaaataatatgatgatcaggagatgttgcagctagccaagttgtatgctaacaccaagcttttatttgtgcattcgagcctgttcatcgcgatgatatcactggtggcttccccgcatgtgccaccgcatcactaacaccgccacacgtgctccatttacggactcggctcgaatatccttaaaagagctcttttcttccactctgagaattaattttctggcgttctttatctatgtgtattttgagtggaaggttgtgagtttatttattcaggtgcacctcgctattgtactttagatggagctattcatttttatgtgctcgtgcttagaaaaatccacgtcttcatttgatatcctaggtgttgaagtcaagatgaaaatgacggatctgccgccgcaaaaaatcgcatcacggccattgtgattactgggtaccccatgatcacatcatgcaatccagttttcaagatttcctcgcgaataaccccgttctctgttttccattccatcatagacccggcaactcccagatctgctttcgaatcaagtttcttttgctcaaggtcgtcataactgatctccgctggcatcgcagcattcaccgcgtgccaaaacaaaagttgggaatggtgccatggaatgtcatagtcatcctcggcgtggattatcgttattcggtatttctctccgttgatctcgttcgcccggatatattgcgcaatggaatccttgctcggccatttgtctcgaacgaatcgctgaagatatttgaagaggaaagggaacctcgcaactggcgacaagattggcacggtacccgcgactcgataggttgagaccaatgtcgcgacgtccacaaatggcgcaacgagcaccgtgcctgcgaatactattggtggatcctgcacagcaagatgtttggacacagcgatgctcacggccgtacccatcgattgagcaaagatcaaaattcgagatggagggatgcctgcaacatccattgcccaatccaccacggcaagggcatcgatgatgagcccggtttcagatggtgacccggtactcttgccaaatcctcggtaatcaaaggtcagaacatggattttcccgggactgcccgctgacagcgcacgataatttgggacgcggtaacccgaggcgacggtccccccagcgccgtgcatatgaagaatcaaacgagcctcagggtcatcccgcaataattgaaatcctagccgagacttgatgtcggacacaaagcctactggctcttcgacaagaggtatttggtgcttgcgatataattccacaggaagaatatgccaagcgtatagccattcaccgtccgtcgttctgatggagaacggagtgacctggttcttcaggaatccaaacctttcagggacattgaggtctttgaaccatgtcgcttgaatcgcgtggagataaacgacatgtgattggaaggttgatgtggtgagtaaccctaggaggatcaggtacaacccaaccgcgacaccgaccggtattgacgcatatttaaagaaagacctggctatgtcgccaggtgccatggtggatcgaaaagtgatgatattatcgcgataagacagagagtatgtctcaaaagtgacggctgacatgcagacacaatcacttaagacatgcatgatgcgcgtgatgaatcgcgtattacactgagtttattagcgtataggaggtagaagagcgagatgttggatgcaatgccgttcacaccaataagacctgtcccgtagccgccactaaattagggcggtttttattgcaaggatcagaccaactcccttaacactgttcattttcctatcggttgttcttttttgcttatttgcgtaatgacgtgataggaaaaatcgctaattcttcttgttgtatctaacgtccgtcgagatatgggcgaagcccgtatctacgacctcccatagggtatggggacgtgctaagctatggtattataatgattgtgcgcatattgaaagcaagttctttaaataaatgatccagcaattttaccggttagctgctcgtccttttccgacctgtgaaatggatgcaggaaaaagcgctaaggacttaggagagtaagatgatacattatccatgctagccaggaaccgtgtgggatataagtgatgccgatagtcctggaataaatctatgacatcatgctgattagaacatctattgatataccagatgccttcctagtgccccaaagaggtaaatagcttagactcctgcgcaacctctgccggactaccggagcggatgaccttcatttttataggctacttatatggaaaattaatgcgaaatgagagcgcaataccggagaagaggaaaatcgtcatattggctgcccgatcgagctaaggtattttgatagactgttcgacccttgatgctcgcgacgatatcttccataacagacctagacagggccatgaggaataggtagaaatcaacggaaaaaaaaatgggcggcgttcataataagatagagcgcgattccacacgcagcgagcaatgacagcacggcagctggaacagaaaagcgtgttattgcgcccagacatggacgagagcgacgagctcaagaattgcaaaggtacaaactgctccttagtcaattatgagtcatcactctagaaatatgttacagctatcaagtataccggcttgggaaagtgaaaagtgcccatcgggcatgacgacgcaatcaaagcgaacaatagctattcaaaaaaaagtgaagtcaaaaactctccgataggatgcaacttcgggaccgaaggcctgtctgcggcgaaagagcacgacatgaagcatggccagaaattgtgtcttctccatagaaagaggtatgaactgttgaaagtccaattgagaaaagggggaagagattaccagcaacatcctacagcacatactatacctatttcaatcaaacggggaataatgcagccacatttcctaaataggatctgactgggaccgttccaatgttctaaagttccaaggctgagccaagccctgggggttcctgtccaggtgatgctctgatatttgtgaatctgcgattggcgatttcaactccgtcgcccgacgatctttcttggctcgtctacctacatagacctgtatgtacatcatgatgccagatcctcggtgtagtgggtgcaatatgtcccaccaaattcaaattaaccgccagattagagattgccaaaataggaactagaaaagtaccgccgaatctgttgtccaatttttcctactttcgttggggatgaggtggagagaccccgaaactagatgccacgaggtgggggctcaatatctcatgcaccccacaccgaccctgtcccatgtgacgcatccggggtacgttggtgcctgaagaagattggaaccgaggcagtggttctgcactacggcatcgattccgccctcgttgatctaggatcaccaaccttataatttgataatcctctatagatattctggctcttgggcacatatgtcgggatcgagtatatccatcctaactctagcaagcgtgcaccttatgtagtactaaataaaattggcgaaggtatactgtaatcagcaccaagaggtgactacctcgggattaaacctcgtacagaacttcgcttctgcattgacgctgcatattttaatttatttgacattttgcatcttctaatctggctaaaaccccgcaatgccaaccagataggttcccactcccgaaccctaaactactccacactatggtacagcggtctagtagctagtgcaccaattcggatatacatacccacagcatagtttgcaatatgagttattttataaatcgaaatacaccaatatcgcttcactatgcgtaatgagttcctggctccgtgctctggatttcctatttgggaccatccccgatgtaacccacctggcgcaattccaactcctccgcggcataactatagtgtgaaaatatagtgacagtgagtacggggaaaggtttgaggggtagttgaagcattatttaaagagcaaccaaggcagtttttcttttttctttcatccaaaacagcgctcaagcagccttgctaaatatttcaacaacgttctacaaaatacttgaatattgttccaacatgttgttcaacagtcaatccttgcttgtagggatatccttgatttctcaagccctttctgcacctcttttggagtcgagggcaactgctggtgtgtcaatccaccagcccatctctgttagctaggcagctctaacctcatctcaagccagcgctgccttccctgatttgcaccgtgcagcacagctttcttccgctgcttacactggttgtatcggaaaagccttcgatgtcactattaccaagaggatttatgacctcctgaccgacaccaatgtaggcgtggtatttgctttttacgctagcaaatgactaattccaatagggattcgttggatactccacggagaagaagaagatatcggttatcatgaggggctcgactaccagtatggacaaattattgattttaatactaggtcaccttgctaattaatccagtcgccgacatcttgaatgacattgatattacccttgtcactccctcgctctcgggcgtgaccttcccttccgacgtgaagatcatgagaggtattaacagaccttggtcagctgtacacgacacagtgattgccgaagtcaaatcactcatcgcgaagtacccggattactctttggaggcagtcggacattccttgggtggttccctcacatacattgcccacgttgcactggctcagaacttcccggggaaggcactcaccagcaacgcacttgctgcttttcccatcggcaacgaagcgtgggccaactttgctagttctcagcccggtactttgaaccgtggaaataacattcttgatggtgttccagtaagacatggttgaactttagatgatgcaatgaagtggctaaccgtagcagaacatgtacgtgagcgggcttatcaacttcaagcactatggaaccgtgagtgatcctatcgagggcttttcatactaatatccaatcgcttaccgaccgtgaccatacataggaatactacagcgctggctcgggggccacctgcgtaaagtgcgcaggggaacgagacctggcctgctctgctggcaatggcatgtacgctgtcactatcggtcacttctcgagctttggcattacgatgcttactgctggttgtggcctgttttgagtaccagaagtggacacaactgggcaatatatgatatagatcgcttattttggggacaaagcgattttggatgattacttcctcgctggcgagggatgacagaaatatgtcaaataacctaacatgaccagtctcaatatatatatcatttgacgtcaatcacactctactatggcttgttaaaacagaggtaagtcataacggcgctcttaacaaagataccacgtatattttcattggttcagatctagcgcatgacgtgagatttcaacaccaatatgcacagccctggagggttctcaaagaaccagccacacagaatctcacttcagcctaagcctcaataacaggtgacttcgtccctagtcacatttgatatcacctgacccccgcattaaaaccccctcttcccattttccttccttgttttttctctttcctcccacgcctgccggagtcgataacttttcgctaagagagtcattccagattctcgaatgcagagccatcccagaactgtgtattcctcgtcttttaattaaggcacggggggaccgtttctgaggggagcttccaagactcacatgcttcgtgtgcatgactagcagcgtcaatctgtatttctttcgaccaactcgtatcactccttctgataattacaagattatttcgtcattcctgaccgtcttctatgggcatatatcggcaataggattactttgcgccgtcatgttcaagcgctctttcgtatctaaggaccgggcgggtaaaaccgtcaaggtcgccaagaagaagtacgacgagctggttaaggagaagatgaagcagaaagtggaaattccctcaatgggaaggtgtgtttcctttttatatataaatgcggacctacgctctccataaatatcgacatctatttcatgtgctgatcaatgtatccctatagcccccttaccagccctatcattactatgattgttggccgggaccagcgtctcttcgccgcccatgaagatgtcctatccgtgtcgccgttctttagtgctgctttgaaggagcagtttctcgaagacggtgccaagcaactgagtttgcctgacgagtgagacaatcctgcctattcgattgagcaaaaacttacacttgagatagagaacctgagattctgtcgtgtgttctcgagtttttgtacaagggcgactacttcccgcgtttgttgcgtggaaagcagagacactcttggtcactcgagaacgcccaggatatcaatcagactggtggccgtggatcgagcgagccgacaatgttccactccggagtgggagatctcgttctccgagacacagcagtgtactgtgctgccgagaagtacggcttggaagaactcaagcgccttgccctccgaaagcaaggtcttcagagtggtattccagccgacgtgatcttgcgatccgctcgatatgcatatgacaacacacccgagtctgattcccgactgcgcgctcattacctggctcttatcatccgcagtcgcaagactttcaagagcagcggaaccttgcagatggagatggaggaaggaggcaagttgttcttcgacctgtttgtggcgatgtgcaaccacatggatgacctgtcggagctgcggtacgattcactttctccttctccttctccctcaccctagctctctgcatatccctccgttactgctgactgctttttctatcccgagtcctgagcgcttacactcgtgtctaccagcaccaagcgatcgccgaggtttttctagacggttgtaacatttcctatgtactggatcgagcgactggactatgaaattgaacaagaaaggcatgcatattttgcaccagaatgacagcgaccttgccctagcctgcgtttttgctttgacagcagcttgaccttcgcttctctcgaggttggccgccctttttggattgaagaaccgaccttattcgcttttaatcggacccacgacgtatgttgacttgcgttcgaccactctacactccttgagattgagttttttcgacacattctttgatgatttgcacttattccactgctcttgtttgcgacagtgattatgcctttgtccctaatcaggcgatgcgttcgtttatcgcctaatttactcttgggcaaggcgcctacttagtgatgagaaacagaaatgaagaaatttggccacctcaaacaaacaaattgtagaagcatttgccctatgcatgctaatgttgtatcccatccccaaccatttttggtcttcagattattgcaagcgtttgcccattgatgcactgaatcgtggattgattttaggttttgaagcagaaattcactacgccctcttcatttcaaggaagggaattggtgttgtgaataaatgtctgctaatttcgatagttttattttccaccggagtcgctttcagacatttcgcacaaccattctcggacctttatacaaaatctcgaccccaaactccttcggagtcctctgggcacatttcgtcaagcgttgttatgaccgatagtgttcatccaaggttatttaatgttgcgggaacagacaagtttattcctatgcaataaaagcctgtctgtagcacatcagaactgcaggctaggtcagtattctctcgtatatcaattgaaagctcataggcagcttttaagtccctgattacagtcattacttgccaataagattggcttcgagtttcttaggtgagtctcggaaccctaaaacaacctaggcaatatccaggatttggggtctcttcttcacaacgacatgatttcttaactctgatatacaacctcagtaaagaaaacctcggggttatcgccaagatgatatttataaagtattgattcaattgcagtcaagaaaacgtttattttctacgacaagaagctctcgcccgtcgcttacaccgacgcattattaaaccgcgggctttgcgttgttctcaacgttgatgggcatctcaatatcacttcttctctttcatagtccatatagcctctacctgtgctagcaaaggcaataccatgtgagttatctagccctcattgcaagctgattccggcgacgcgaactacatctgcgagatttctgaccattcagtctgcgctcagaagcctgtttcctcttcttttaaaggtcattaatgatatctagtaccagctgcaattctttaaccaatttcacaacaggagtctagcttcccatcattatactcttggttctatctccggcaactcaatatcgtctttcggattgatcgcttacaagatcaatcatagcttcacttccttctgtacttcaaaaattttgacttgcataaaacaatcttccagtgatactaacgaccactgccagctcccggtgacaaagaccaacaatcatcttctcagaagagcaacgaattcttaaatcatccatgcacaacctcacaaccaagatgggacctagaacttatttgaccactgacttgaggcacctaggcaagccacgcccgctggaggctggtgagacctatgttgtccggttcaaaaactccctccgtcagtacaaagctgatgtttggattggcgtcgtgctgccggagaaattcggaccaagcagacatgtcaatcgccgccctgttggtgcccagccagttgagggtgtctggatgacacaccttaaagaccgggtttactcaatctatcttccgggacggaatatgtagtaagtttgatctcctttttaacacccaaaaagacacccaacgcggtgtgtttattgatgtatatatgtgtccgttggctttcctgcacgttttttcatctatatgtcactatttctgattgcacatatgcttgtttgtctatacagattggaagctaacatgcataaagcagatgggtcgggctgcaggatctctttgttctaaatgagaaaaccgtcaatgtcctccggcgtgcgcagagagaacaagatgctaagatctgggatgatctggtggaaatcattcgaactgagcccggactagaattctggaagaacatggctctccaggagcaaggtgctaagggcaaacgaggcaaggaactgcgtctcatcttaccgagtggccacgaaggccttgtctcctgtggagaaagcgatgaggaatctgagtccgaggaggaagataaagaggctgacgaagaggaacataaagaggctatattagatcacgccgagcctgttactgatgttgcacccaacgcatctaatgggcaatcaaccatgagatcattttctgactcgcgtgctgcacagggcattcagttcaggcaggaattgggggttttctcagatcctacccccgctacaattgcatctgattccatcccctttgcagacagagagaactctaccttagggatgacgaagaaattccagcctttcatccctctgatacctcatcccccttcttctcgcccaacatcatcaccattcattacgctggcgaccaccatgactctgaacgtgatgcccaaggttgaaaatgatactaggtttgccaaattctaatgtccattctccacgcacattcactgaccaatatgttttaaatctacagtgatactgctagtgctgttgccgatgtggcatccgagaaacccgctccagaggtctcgatcttcgacctgaccctcaatcaggctctgaagcacgtcttcctgaaccagcatgaagccgccaagatcatcgatgttttcataggtgccgtggctcttgagagacagcccgaacagctgcagatttgcgagtacctggccaatggagaattcactcctcgcctgattacactcaagaactctggcttctcccaccccactccattcccagcctttgattccaacggcgccactatctaccgcctggttggtgaccaaatgggcattggtcagaacttcaagttgaacggtgtgggcaacagcctcgatctggaaaacgccatcatcgtccttggaagagtgtacctccaagcccgtcgttttggcctaatggatttggtttaccgaattgcattcaagctccaagtcgcctggaactgttacccggagctctaccaatgcaagcccctgcttgaggtcgcttctcttgctttcaccggtaacaccgagttcgaggagcccaattgcgattacctccagtcgtggttgattcatttcattgccgaggcctccgatttgctcacctacaatgctagcgagcagttctggtcgttgttgcgtgcccatccaaagctccaggacaaggttctccacctgcgcacgctggctcacgtcaataacccggagttgtatggaaatacccgtgcgctcctcgacagtcgtggtcttggaaacctgtgatgtgcattctgatcgagcggggataacacagtgaactgtgacccccttgtctcccaggtgcatatcaagcagattggatttctcaactctgcttgcttggttcatatttcgctttctactggtttcgaccttggatcatttgtattcttgatcattttgcttttttgcgtgctttttccttgcatttgctgattatgagctccggtcatttcgatcttacacaacagaaggagtcacatctcaatggttttatcttcttttgtttccgttgctgtgaggtggaaatagtgaggccgtgcaagcccatagttagcttttatgcttttatcagggaattattcttattcaacagatttcgtctttgatactcgcagtgatagatagataggccttcaagcgtactatgtatttcaaaggccacacgcagcttgaatctcgcaagccatagcgacaagagtagatcctagtatccgcccagcaaccttgatgtacaaaccaccttgctattgaatacctactgctgggactattttttttaaaaaaattgaattcgttatgtcaactcgtaggctaatcaatggtgagaacgatcccaaagtgcatacaaatatggcggtgcacctgtgcaaaccagccatcgctaaagggaaatcgaacctcacgcctagaggaagaaaaagaaagaacaaacaatggaaagaacaaacaatggaaagaactgaaagaaaagcagaaaatcaagattcgttaaaaaaactacccgagagaaaagaaataccagttacaacataaaaggcggaagacaagaaggaggtggtatttcttttcataattggcatgactgccaattcatccacacgaagtgggaagctcgacacgaagggaaagacacctcagtagtcatcgttagtcttctcagccttgactggcttcagaggagactcagactcaaggggcatctcaacgtcctcagccttgattggcttgaggggagactcgaggggcatctcaatggcgccctcggcgggcttctcggcgtcgatgacaataggctcatcggaaatttcgggggaagcaatcctaatctcgggagcagcctcggtcttcacgatggtgcgctcaatactgacagatgtctcaggggaggcctcggaagactcctcaacagcctggtcagcgggcttagcggcgaccttcacggcagctggcctgcgacctctcttgggcttctcggtggtttcagcaacgtcgtcggtggacgcctgcttagccttgttggctgcaggcttgcggccgcgagttgccttgggcttgttctcgggggtgctgttgttgtccttggtcttgctggtggcactgcgagtgcgggacttctcggtcaactcctcggcttggctatccttggaagcatcggattcgctggtcttggcttccttggtagccttagtagcctttgagccgttggtctttgcgctaacagccttggcacgggggacagacttcttggtcttgccgttggtagggctagtctcgttgtcggtagaggagacttctttgttgggagaaacatcgttcttgggatccttcttggcgcgagttgcacgcttcttaggctcggcggcaatggcggtctcgctgtcggcagatgagatatccttgtcgacgggggaaacatctttgtcgagatctttcttggcactggaacgagtggaacgagtggtacgagtcacagtcacctccttggttggctgatcctcttcggcaggctcaacttcgtcggacttctcggtgtcggtagtctcagagggagagactttcttgctgggagtcgcacgcttggtggacacctccttaggctcaatatcgggagaggcactgatcttcttgccacgagtatcatgatcatgcttcttgggttcagcggactcggtggtgagcttagtgtcagcatcggcaccttcgtcagaaactctcttggcgggacggccacgcttcttgggctcggccttgacctcgttgtcggcatcaggactagccttctttgcaggacggccacgcttcttgggctcgaccttgacatcggtctcagcaggagcaacttgctcctcggcagccttcttggcgggacgaccacgcttcttgggctccttgggctcagcctcaatgacagtggcctcagagatagcatcatcctcgtcagctttcttagcacgagtttgcttcttcttggcgggcccctcggcagcatcctcagaatcagtcaggccatgcttcttggcaggagaggactgctcatcatcgtccttcggctgttaatgaagttagtatgtcatatatcatgaggatagaacatggaattcacctcatcggccttgcccttaccagccctgacacgcatgcgagattgtccagggcggttgcattcaatatcctatgaaggattagtcagctgatctacagtctttgagcatcaagacaggtgaacttacgcccttccactcgtcgtcttcgacgtggcccacttcgatggccttgcgaatcttggcctgtagttccttgctcatctcatcaaagccatcaatgcgagagaaatcaggatcctcgctgttctcagtgagcgccttcttgacgttcataatttgcttgggggtgaagcagcccctgcatggatgtcagtactcagggctatcatagaccttatgttttaacaaggctagactcaccagtggcgccaggaccagctctggaaggtcgagccgtcaacccagctgccgactcgcaattcacccttggcgatctttgtcttctccttggcacattcagagcctttgcagccagcacggccttgagcagcgacctctgatcatgaagttagctgtgatgtcttgaagtctgtcatggtgccttggatttgggagaggtaggtgtttttgccagaaatgccataggttagggcacaacatgacaatatcagttgtgaaaccaggcattttcacttgatacaacagatatacatccatcgaccatgagcacagcagtaggaagacatagagatatgagatgaagctacttaccgaaacggtagggcattttgactagtggtagtcaaaagtagggaaaaaaagatgtgtgagagaagttaacgatggttgtgaagtgaagtaggtacatatagttttctactagcaggtcgctggcgaacaagggaaagtgaacaaagaaagcgagaatcgtttgcacaataaacgcagtccgaaaacaggcaagttcgaaattgaagttattgtcagagtcaaatgaatagaatgttacacatgcatgagcgtcaattgactttgaaccgagtattgactcacgttctttcattgttctcagtcgaccgtgagtactcgtgagatatgaagtggctgggacaaagaacgtgtcatacccctttcggacagctgtgttttctggccaatcagagttcttctcggcgcataatcacattgtactttttgtcaggatttctttctgaattataattaatacattcgactagtgtgtatagatccgacctactagacctaaaaggggctggtattaagtgctggtaagaagatgaaatctattgttcaagtggtagtccaagtattgttaactccaatagatagctcaaaatagacaatagttatccgcggcaaagttggagtcatagaaatgagggtatcatagcatcttgtagcataatgaatgcaaaatttaacgatgtgacgagaagcgttcgcccacgttcagaatatgttggtgggagtcgatcgtacctgtcatgatatatttttagtcaattttgtagactttcccattctataggcatacgttgtataaacatccgtcatgggaatctgacagaacgtaatgctaagagaataagagtttcacattagcatcattgtctacaagctgtcctgaaacttccaccatgcgtccaggacatcgttgtagcccattttttccagacgctgtgcgacctggcggcgctaatcttttttagaatattcattcccataattaaaatccattcctgcggagattcggaattttgttctgacccattcgatagggacatagccagcaagctcccagtcgatgatatctagcgagcctgtcgagatatcgacaagaatgtttgtaggaccaagatcgcaatgataaaagacaagtctagagacatccatagacatctcggtacaattctttaggagctggaggggcttggaattcggaagaggcttggaattcggaagaggcttgggtgcagctgagagagcgaaatgcccccccattgccgtcgctccagcatgcttggtcgggtggaatattgtccgggaggggggacgaataatgagtaagaagaagcgtatttgagatcagccaagaacttttgtcaacttcttgtatcgagtcattgaggtgcggctgaggcaggttaatcgctgacatgtcgattgatgttgaggttcgaataaacacaaatattgctgtagccgttttacctatggctccccgctcaccgtgtcagtgtatactacagtatctagaagatagccgattatcaacaagctaaatagcatagaagtaagtatctcgaactaacaatcgttagttaactatacaaaagaaaatcttcagaaagggtatgccgctaaccgaaggcggttagagtatgtcgacgttaaaggttcaaggttctacatcttgagcttgttactacttactactcgcctttctcgctgctttgaataaaccaaaatctacacagcacacagtggaaatctcccagaaactgaaggccaggctcttccaccaccaatttaaagccgaagacgcgaatccctctcactcgcgcaaaccccacgattccacgcggtcgcatcacctctcctcaacccaacatccacacaatgtccgagccaggcccagagtcgatccccacaagcgcggatccccgcagcaagcggccaacaaaacggcgcgccgtgacaccgcattccgaggtcgccaaccagatcgagacactcttcaaagacccgagcaaagacctgcaactaccggatgtcctgaagccgcgcaccgtcgcgtccctgtcggcgccgccagagatcgtcaccaatgtgcagggatcgtcggccggtgcgggctcgggcgaattccacgtgtacaaggccagtcggcgacgggagtatgaacgactgcggatgatgcagtccgaggtggataacgagaagaataatgagacttgggagaaagagcgggaggagaagaagcgcaaagatgacgagaagacggagaagaatcggaaaaggagggagaagaagaagaatgcgcgtgggaagaagggcggtggcgatcataaggatattgctcctgtggagagctcggctgccccgggctcgatggtcactatggaagaccaaaatgggggcgatgtggatggccaggtggcccagcaggaagttcctggtgtcattttccacgatgaggactaggggcagatttaaatgctggctgtgtacgatacgaagatacccatctggatttggtttttttttgaatctaggatattcatacagaaggaagacagccatgaggcaaatcgtgtaacattatgtacggacctcgagtccaagtatcatttttctttttcgtctatcaatcattcgtcgccgccaccaccgccgccgctgacctgctgggcggactttgcgctgcagatgtcgtcgacacggagaaggagacatgcggactagaaagagaaatatgttagtgaaatgtagtgtgtaggaaacagtaaaagcttacctcgaccgcagtcttgatgctctgaagcttgacggcttcgggctcccaaacaccgtactcccgcatatcaaccaactctccagactcgccgtttagaccccaggtgttgtggccctcgacatgcttggcacggagactggtaagcacacggatagggctagcaccagcgttctgggccaatgtccggggaatgacctccatagcgtcggcaatggccttgtatggccactgctggacaccctcaacggagcgggcaagctggctgagctttacggagacagccatctcagtagcaccacctccgggagacagacgagggtggaagataacgttgcgagcaacggacatggcatcctgcaagttgcgctcaatctcgttcagaatatccttggaggggccgcgcagcaggattgtgcaggccttcggggtcttgcacttgcgaatgaatgtgaagtactcatcgccaatcttttcaatctcgaacagtccgcacccggtaccaatatcagactcctgaatgtcatcgacgcggttgacgatggtagcaccggttgcacgggcaatacggttgttgtcggtctttcgcacacggcggagggctgtgatgttggccttcaccaggaagtgctgtgcaagatctagtaaatctcggtggttagaacatgcaatcaatcattcttaaccaggtcgcctgcttaccggaaacacccttctcagtaataacaacgtcaggcttgaaggccagaacagcctcgcacatgtgcttgacctgctcctcctcaatctggagaatacggttccagtcatcctccttggaaatctcaatgttggtttgagactcgcccttcttgtactccagggggcaatccaggagaagaatacgggggttctcgattctgcgacgcatcttgggatgcgtgatatctttgttgaccatcacaccatcaatcacctcagagtcctcaatttgaccaccggggaccttctcaatacgggcatagcgtttgatgtcgacttcctgctttccactaccgacatcgaaggaaacggttcgcacagccttcaatgcaagaccgcacatgagctctgaccaacgggacacgaacttggttccgatggaggactggataagactgtacatggccttatcatcatgaatgtcgacgggtgtcgagacatcctccacgatctgaagggcatcggcgagggcgcgcttgaaagcctggataatgacgacggggtggatgttgcgttcgagctgggggacggcctgggcgagcatttcaccggctacagaatatcagcattgactatcgagtcctccgaaatcaatattgccatacctaggatgatgactgtcgtggtaccatctccgacctcctcgtcctgggtacggctgagctcgatcatgctcttggccgcggggtgcgacacttcgatctctcgcagaatagcgtggccatcgttggtcaacacaataccacccatagggtccagcagcatcttcaacatcgccttgggtccgagacatgaccgaatgatatccgcaacactggtgtttattgaattagcatcgagcgggggagaaaagcggaggattgagggatagcgtacgtcttggccgcggtaatgttagacatctgtgctctccgaccaacctggcgctcgccagaattggtgtctggatgatttgttagcacttaaaaggggagcaacttgatgggggggtaacctactcatcaccaccaccggagcctgcatattggcggtgatttattgtagttgagtgggaaatggatacaaaagggtcttgatcacttgtgaatatcaaaaaaaatattgcacgaagatgatgatccaagagttcggacgtcaacgctgttcgcccgcgttctattaaatttccaggcgaagtgggagctccctcgggctagtccatatacggctagcgtggggccctgacaaactaggcaaacatctccaacttcgttatctagaagtctataaagctgtagttcaatatatagtctcactacttttctcattgggtatttctataaatgttcaaatagcactgcaaaaataaaagtagtctaggaaaaccgccatatccgacctcagcatgccaagcgactaccataccaatatgtgtcttcacttggatcacccaacttgaaggacatgacgaacaccctgggcaaaattgttagcttattatctacggcaccaatgataatagaaattccaatcagccaaaccaatatgaaggataactccgctgtttcgtaaagggaatatctggatgcaaaatcacacaaaacgagcaaggataagtacgggctaacgcaagctatgaaagtagtgtacaagaggtggagttttgttcaaaattcccggctctcgccaatatcacacacatcgaaaacaccagtttcagcaagatcatgttttttcaacgcctccttgagcttcttgggaggctcaagcacatcctcctcagtaagcacccaagtgccccagtgcatgcccaatgcatttttgcacttggtatctttgaaaatgtgaacagcatcatgagggtcagaatgtgcggcactgaaaatatgacgaggtgcgtaggccccaatggggatcaagccgagatcaaatggtccccggaactcacctatctgcttgaaggcagggcaaatagggaaattgtatttggggtcccaatcatcctccccttccggtagctcgtccactgccctgtagccggaatcactagattgaggtcagcaaagcaacattctgatagcgtagatggtttgggaaagatcatacccagcaaaatacaccttgctaccgccagattcaatggcccaggaagcccatagtgtcttgtacttatcgaaaggactgcgggcagtgatatgctgacaaggcagacaactgatgcgtgccttgatatctgctgtggcggaagcttcgcctacttgttcaacctggggattctttttctcctcgggtgacattgcaatatcacgctcatcccaccaatccaactcggttacattttggatgcccgagctgtggaaccaagacttgttgccaagtggtgcaaagaaatggcaattggggtgccttttcgcgatttccgagatagttgggtatgacagatggtcgtagtggttgtgggagatgaccacagcatcgatgacagggatatccttgatctggcatggaggctcagtgtagcgcttcggacctaggtgatatggtccgcagcatggcccacatcgcgcttcgaatactgggtcaaacagtactcggagaccgctcgggaactccacataatagcatgcatggccaagccacgttgaacgcagcttgggggtatctcggctggggagaaattcgggcttgcgaacggtgacagttggaggggtggtatcgggattatttcctttgccgttgaatcgacgagtactatagttccatgtgttagagactggcttcctgcgataatcgatcggtatacctacatcatcatttgcatgatatctcttgaagtcagatcgcgaaaagatctgtcatacggagttgctggttagtctatacgaatgattgcagtcacggagcgtcacttactcccacgggttcctgaatccattctgtgcatggtgacttttcttcaaaacatcttccgggctaggtctggccggggagttcgccacagtcagcgcatatagcactgcagtagtgggtgttgtgctcatgttgcggattgccggttgaacagttcgtcgataccaagcccgccaaaggagcggataacggagaagaggtcgcatcgaaggccaaggcgttagaaaataacgccacacagaatacgctggcgccttaaggacaggaatgcgagaagcaggaagttactttaataccgataactccgacatggggccttcgcgcgttgggaacgccgataccaccggagttccagcacatccgtccccatcttgattgcttgtagaccactcaaggtacattcaaacctaggaaggttgtagttcactttctcatcgtcggtctcccatggattgccctgtgaaacgcccgtgggtacctcaaatgctcggcccgttgtaactccgatatctgtgcttatcgatcttctcaacattcgcgatcttcacgacactgttgatttggtatggagccaaatgcggtccctagcgctgcgccgtctgcgggcgatctgattctgcagcagaaaacacaggcgctacagtcggcccaaaacggcgacggaagtctcctctcgcagctaacgagcaatcccttgtttaccgcggtatgagccgtgccagtgtttcgatcccagatgatgtgctaatatggttctctgctagggatttggccttgcaggtctcggagcaggattgacactagcacagaaaggtgttcgacatggcgccgctcttctccgccggcggatgctggtggacgtcgagatcagcatcaaagatgactcgtatccgtggttcctacactggatgactctgtaccaacaatcacaactcaatgcaagcaaagccgctgcgaatacctctacctacatggaccgattcctccaaaaactcacgcccggcatgcgccatctctccatccaaacgcagaaagtcgaacattcgaacggagcaattgatacacgcttttcgctgattccgggtcctggaaaacacgttttacggtacaagaatgcgtttgtctttgttaatcgtatgcgcgagtcgaaatcccgcgacattcagaccggaaagccatgggagacaatcaccctcaccactctctattctcaacgtcacatattcgaggacctcttcaccgaagctcatgcatacgccgcgaggggccacgaaggcaagacgacaatatataacagttggggtaccgagtggaaaccatttggaaatccgcgccggaagcgtccactggagtcggttgttctccacgagggagtcaaggaacggattgtggcagatgtggaagacttcatttcaagttcatcatggtacaacgaccgtggtattccataccgacgaggatatctcttatacggacctccgggcaccggcaagagctcttttatccaggcgctagcgggcgagttggattacgacattgccattctgaacctgagcgagcgcggcttgaccgatgatcggttaaaccacctgctcacaattgttcccaatcgaacgctggttctgttggaagatgtggatgcggcgttctcgaaccgacgcgagcaaagcgacgcagatggttaccgcggggccaatgtgactttctcgggactgctcaatgcacttgatggagtcgctagtgccgaggagcgcatcatcttccttactaccaaccacgtcgaacgactcgatgaggcgttggtccgtcctgggcgtgtggatatgactgtccgtttgggcgaagtgactcgttaccaggtcggctccctgtgggatcgattctatgaagacatcgataccgacggggtttatcggaaacttttcttggatcggctccaggagcttggcttgattgaagatgaatcaggcaacaaggctgatcggtctattaacaccagcgcggctgctctccagggcttattcttatataacaagggtaacatggaaggtgcgattgccatggcggagggtctgacccataatgtgcacgctgagacattaggtcaagactaagggaagaacgaataattgtacactatcatgtaaataaatcatcaaaatatagacatccttgtgggctgcgtcctttagctcatgccccattctcggcgtttccttctatatgtctacactgtcaggctgatggcagtgcatctgcgcggttctccgtccactcgttcttaacagggaataaataaccaacaaggatgagatgcggtgccactgatacgatcgacccttagaacaagccaagctttatgacctgaagattatcactatcagcacatgtgaagtattcctgcaccatagaaaatacttctcaaatccagggcgagcaattcccatttaatcgcgcaatttcatctatcagtattataattcggcctttcagataccggtcgccatgaaatagttgttctttctctcgccgatgactgaactgactgtcttagccatcaccctcattacccctctacaattcacatccgttcctcaccgccccccgctctccgtttttcgtccgtatgtgatagcaagatcagttaggcgcttttgaagagtttaatatatggtgtgacccgtgtgttgatgtcaatcctgtttcttgaaattatccatttaacaatatccggagccgataagatgcagatactagggtcaacagggtcaacagggtcagcagggtcaaactccccgacttcttcaacgcaaaaataaccagccaatataatctccggattctgataaatatagattcctcatgagccaagcaccaatcaccacgctgtatcgaagcgccgctactgcagctgagatgtgcccatcccaggatggaggccaatcacatccctaaacggttaagcgcccactcgtataggcagggttgtcacacatctcgacaaaccatatactctgcttggtctgtcgggctgatgcgcacattcggtgagaatgggttatatctcacccgagaccccctgctttcgcgttctgtctttgtttatagcattcattcgcgaagatgggtgacaagatgaatcaatttcaattatttcctgctccatcacccgaggtcaataggtccaacaacccatttcgcaaagtcgggagaaagccagtagccacatctgagccggcttcttcgatccctcttcaggaaatcaaggaccctggtaagactgaatccttgctgcttcagattatcgaagacacccagggtattccacctccgccaaaggagaatggttcgaaatctaagtccccaccttctatggtgggagcatctgattcaaaatctcctcagtccatgcacagtcagaatcgtgaagccaagagagtgaaccatcaggccttgccttcacagggcagtcaaagcagcagcagtagcagccaccacactacgccgtcaactgtctctccgcagtcatcacaatcgtctgcttcctcagttccgatgaaatcaatgttcccgcagttcaatccaaaactgcctctcaaccagcaggtatatcacccacggcttccaaatgtgccaagtccagccaagtcttctcgaaagcctcctaagcttacgctttcgacaaatactgagattgaccatgttctcgggccaaagactgtgcctgcaagtgtgctcaacttcccaactggtgcattggagtccgaggaggttacatactcctctgtggaggaactgaagatgttatgggaaacggccaatggccagagaacacgagatcttgttgggtcattgaacctgcgcatgacaaagtaagacttcttgccttatagatgtataatactaacatctcacagaacgggaccagctacatttacgctcggaaactcccagaacccgttttacacactacaaacatattcaaccaatgaactcgctctaagcaggtgcgacccttccagaccaaaccacgatgtaccaatcatgatgatgagcctcgaagaccgcatacgtcgcgagcatcccaacgacggactcgtgaccctactcttcccccgactagcagccatgttagctatagaccaggccgacgagatcagcaagcaacaccacctcacgcccgccgagacggcggaagtagaaaccgacgcactcaaacgggcagcagcacaagagtcctgccggctctcctggaaccgccatcaacgactatacgagctacggcacccatatttctcaagaaataacccacctgctcttgtcggcgccgccggaatcccactctcacccgtgcgatcccagtcatcaggaatggtgcacatcacagtcgatgcctctcctcgccagccgccaacaatcatcgtaactggcccggtctctccaacggcactggaagccggtctgcaagctgctaatgcacgcacatccgtgcttcccgtcacggacctcgacgagccgctcgcgtccttggacttcgctacgaagacattttcgatttcgccggctgctgtggtcgctactattccctccctgtatgccattgattctctcattgctgcaatgttagcagtcgccgtctcagatgaagccacgaaccccatccttgcagacatgcttctcggatcgccgaagtcgtctagacctccgacctcccacaatcccgggccttactctatgcctgtgttccagggtaaactagttacgactgttgctgagcgccaagatacagcagagagcatggatttggcatcgcagattaaatctgcgcagaaaaagtccaaagagtcggggaagaaaagtaatctcaaattatggagtagattctcttccaagacgaaggaaaattcgaagaagagcaaatctcagcaggttgtggttgaggagtttgacctggagaagtatggtcgatatggcaatagttcgtcgcgagaggggaagaagttgcctggaattactcgcaccatcttgcgtatactgttctttggcttggatatagttgtgaagggattgacgctcattgtgaagatcttggcttggttattggtcaattcgacgcggtgtgtgactagtgagaagttctgagctgggcttgaatcttcttattctcgatgttggttactattgggttttcctttatatggaactgttcggaagcaatagggtgagttgttggaccatgtcttagttatactgttatacccaatttgatagttcttcgcgttatctttagactctaagaattgcccattatgttattcccacacagtactcaatgtccatatatatacacgggaaaattacatttggtatcgccaactgattgattgatagcatcttaagctatagcctatacctatcgccggcagatccatacttcgaggtgacatatttcgactccttggatattacatctaagcactacatatcatagcaccaaggtggtatcgacttcgatcacaagtagagaatttggattcctttgaattgaacggttaccagccatcttgaataagatccatgaaacagaaaaatgagactgtcccttgatcctttaatccaacattcttcggagtataggacctagggataagccaggaacgtcacagggagatgacaactggtagattcttccatcagtccagtacatacaaacgataaacaggagaccaagcgtacgtggggctggaaaatgccacctgaagcttcactcttaggataagcaccgtcccggaattcctagacgtcataaacgccataacaccgcgattaagggatgaagggatatggatgtgatgtcaaagcatttatttcctcgggaaataattgataggggaatccaattgtaaataaagcaccgagtattccacgaaccagccgttccctccatagcttcgttccgttatatgctagactccccatcctagtacaactacctccaagctcgcaaaccacttctccaaaaaccacacaatatccaaaatgcgttccttcatcactgcctcagtcctcatcgccggcgccctagcccaatcaaccgaagactacctcaagtgcgccgtaagaactccaacccaataaaccaagtacctaaacaaacctaacaacccacccagagcgccgccttcagcaacatcaacacctcaaacttcacctcctgcagcaccaaaacctcccaagaatgcttctgcgccaacaaatccctaatcaaagccctaaccacatccactgccccagcctgcgccggcctcgacctaacatccctcacaacctccctctgcagcaacacaacagatgccgcacccgcacgacacgcaagcagacccatgcagctcgccgacaagaagcgggccttcgcacctgcgcccgcacctgagcgcgaagccgaagctgctgttccgcacgtcgtctacgtgactgagacacgcactgattgcagctgcaagagcactccggttgccgaaagaccgatgcatgtctcgcagattccggttgatgttcccgctagcagtgccgcttctatggcggtggaggcatcttcgacgccggctagtcggctgcatggcttgatgggtggtgcggcttcgtcgtctgtgatctttggtccgcaagctacgtcttcggctgtgccttctggtgttgatccgactcgcttctcgcctttcaagggggcggctgcggcgggcgcttccgtgcatggtggtgttgcggtgcttggggttgcggctgctatggctgttgttgttgcattgtaggttgtttgaaagggtgcttctcgtttatttttgacttggttagcagttagtttatatttggggttttgagattgatgttcagatgggttcggacttggtaatgatgcatgaaatgtgttttggcagtgttattagtcgtatattatcttcaattagattaacgttcaccgatttttgctgataattcatacatggcgaaaaagcggatagacattccacctatagacgtaagagtaaaactccaagacccctgctgcaactttgtctggagagctcaagcgtggactgcctgctggactctagggtaaatctccaccagcttgtaataaatatccgggtggtcattaatcatgacctgaggatcccaagccatcgccacgaagatggtctcaacgccactaccaatgggagtcatgaagacctggcagacctgaagaccaatcaagaaagcgaaagccatgatgaccgcggtgaagttaccatccctgttgtacgcggggttggtgaactgcagatagagataggacaacagcgcacagacataggcgacgaaagtcgaacccatagtcaacaccggacccatcaggcagtcttgcacgagagcatcaattcctcgatcgcgcatcatagaccaagtatccttggctgcggggatatatgcctttccgtacaatgcgatgtgacagaacgcgtagcgattgaaaagcgtaacgagccagtccaacagcgagatgatagatcccaaaatccaaacgaaaatactgccgaccaagttaccctgtccagcctcttgtcgctgcgcgaccgagcacgcctgccgcaacatgttgatgaacgcgatgatcagactgccgaaactgatactgccaaaggagtacgtagtcgcgcgacggaaggcgccccgggtggagcccttgggcatgccgccggcggacttgctgaagaaataccacgaaccgtagacaccggcgacggtggtgtgcaccgtgttcttgatccactcactgacccagtacatggcgaaggtcacgtagacgacgaggccgatgacttttgctctgctgcagccgccgttcgtgcaggatgggttgttgccagtggaatcgggctcgtaggcgacgtagatcgagaccatcgtgacggagaaccaggcggcgaaagcgaccgttacgattccgcccagcgcgctgactacgaagatgtgcccgtaccctcgggccacgtccatggcggtctgcagcataaaggcagtgaatgggattcgcgggatccagctaatgaaacagacgattgcgaagacgccgaagatgaggaacacgataccacctccatattgcttgcgcgcgatgtaatagattcctgttgccaaggcgaagacaatgttgagaatgccggtcgcccagatgaaggtcttggtgaagtatcttgcgcccatgaaatagagccaagagaagactagggcgacgacaaggacgaagataaacaagacgagggtgttggtgtccagcgagaaatcattgctcgagtcgtaaatgccacctccgttgaagcctttgttggtggcatacttgtggatggtaagtccggacacggcggcatacccgaggaagactgcgatcaactgtgtaataggttagctaaaggaggttatcaactcgacacggccacactcaccaaaagacctgcccacaggtcgttccactttggcttctcgatcttgaacgcctggtcaaaagtgtatccagactctgggacattttggtggtactgcggtggtttgggctcagatggaggttgctgataggctggttgctggtatggcgcattatttggcggttgatagttcccatgttgctgttcataaccagagttgggcggatactgaggttggccctgagggaagccctcattattgtaatagctagcagcctgtccactcatatctgcgacactgggagaagggggaaaacaaacgaaagaaggaaaaagaaacaaaaggggcagcaagggttttttaggtttggctggatttgactggtgacgacatgaaaagaatcgcaaacctcgattggcaacgaactcagccctagcgatcgccgatctgcgctaaatcgacccgtggacccttttcttagatcgttgaagatttccgatcgcctcgtcatagtttgatttgacggagctttgatttcatctgaagagtttccatggctcgtgagaaatccacaatgtaatttggacatccggaaattggagagcaggacctacaacagaggtacaacgagaattatagtttgcccagctttgtttctgtcatgtcctgttattacagccctataaggagtagtggttaattaactaaggacatctaccaattggtaactggattgcctaaaacttgagaaatgccaagtcggttgcctgcttggcataggacttcgttacgccagcaggaatttgaagcgacttgatattgccccttaacatatgctcgcgttaaccttggaaaacaaggtggattgggtaatcacctttgatgcagccctggcaacattggcagtgtgaacaattcaacgagtatatttgacatcaacaaaacgcggactggctgtcattttcttgatcacaagattcattcattgctactctcgagctctctagtagggcacctccatagaccaacttttccacaatgcctcactggtcatgcgaatgggaaagttgtaagaaaccagctgcgcagagagcaggagattgcttgctatgcgataggcacttctgtcgcacgcaccgccgagagccgtggcacaaatgcccaaagccagaggtttgtggtatagccataatacaaatgctcatgctcatctaataggaaaactgggaatcatactctgctcaatatacagctacagaggctcctcacatagacgagctatgccttcgaatagactgatattgttggcactctctttgacgtcccactaggcgaccaattctttcttaagcacccggatgataagggcgaccatattctagttaaggaatgttacaatattgtgggtatcatcgactaggaatggacgcaaactgtctccaaggcggaggcattctgttcccgtctatgatgtggctggcagctaagttctacaccggctctcatgagctacccgcggacgaattgcagctagctgctatctttcgcgaaaagggccgcgaggatcttgccgtctgtgtcgtcgagggcaggaaggctcaaagacttttcttcgctcttggtcctgagagctcttttctagatagacactttcacatattttcgcaggactccagcgggccttcaaatttaaagatgaggagtgggaagcatggaagagcaaggcttcaaagaaatagaaagatgatgacctacttcttggcttgttagaagaagaaaaaaaggaggaaggggcggggcgaggtgagagctttgaaacagaatagattttgcaaatccatttgtccaacagcaaaagaattactgtgtgaaggttggtttcaataaacaactaaacagccttagcagctagggaaatgaatctatagcatgctctcgaatgtttacttggatatcattcatacgaaagcttcaattctatggctagcttgctgtcatcatattctgaagctctaccatcacgaatttggcagatttccagttgtccttgagagaatccagggatcaaacctcacacgaacctagtagtagtattcttccctaatgtgtggcacataattgtctagagtcgcttgacataaatcgtatgtaaaatcgggcaccgacttcatgagttcggcatcaatcacaggagtgcgccctgttcgaagacgcggtaggttggcaactatcatttgaatcgccaattgcctcagcttctggtagttggcttgtgtcgaataaagttcttggatcatttctgcaaaggagtctctttcgagacaatccatgaatgatgcacgaaagtgtccctccgctttgcttttcagatcgccgatcatgaagtaatccgccacgccatacatgcgcacatggaagtaacatggatgacactcagccaatgtatcggccacaagctctacggtgtcccgttgctcggatagggtttcgtcatttggagctgattcatccatggccagttccgttggcaggggagactctatcattggctcgtctgcgtgagcttcatcgtcaacagtctctggggatttaggcgtgcgggatcggaaggtgtagtttcccgtgtataggaattccagcatcttctcgattaggatcgggtcttgttcgtccagatcaatcgggttgtaggtttcctaaaagtcatcaccgcttgtcagttgtggtacgaagaatcgtccacaggattaacttttactaccttgaacccgctagaacaagcccgacgaaaatactctgatctagagcagacgaggagcttatgagcagagaagaccgcatccttgcaaatgatagtcaaatcgctatagtccgagttgaggtggaggctactttagcgttagttcatcgaaccgaatgtcatcctgaattggtgatttctcacctagcaataaggccaagaataatctcctggtctctatataccgaagggtctagatcactcattgtggatgatggtgaagccttatatttcttctttttcgcagccatacggaaaatgaaggtatggatatcttggtgggtttggcagattgtaaagttggatgaccaagatattattctagcgactgatattgtttgctacaagcgcaaatactgatgcaccgctgcctaaccccgcttcctttcattgaaatgctatgttggtttgggcggcaactatccctgccacagttgtaccctaggcggcgaagcctgcgactcctgctgaggtgcatgactctaggatccgctggttttaacttggtgaaggacatataaaacaacggtcacagcaatctctcacctcgataaccaacagctctcgtttccttttcaacctgacaacacaatcatcacaatggcaaccaaaaatctccagtccagtgaccatcgcgacctacttgatattatcgacaaactcagattgcaagggattacccgttgggtcgaccttccagagatcatcgtttgcggcgatcagtcttccgggaagagctcagtactcgaggccatctcaggcatgtcctttccgacgaaggacaatctgtgtacccggtttgctaccgagctggtccttcgacggggagaccggacaagcatcgacgtctctctcattccggacccgactcgccctgaagcggaacaggtgcgactccgctcccaaaaattccacctcgaagagcctctcaatcttggaatggtggtgaatactgccgaaagtgtgatggggctggatggcgcgaacaagggcttcagcaccgacatccttcgcatcgagctgtgcggcccgacccaaccacatctgacgttggtggacctgccgggtctgttccgggctgggaacaaagaacagtctgaccaagacgcggaattggtggaagagctggtgatgggctatatgaagcgcccaagaagcatcattatggctgtggtctccgctaagagcgacttcgctttacagtcggtcaccaagcttgctcgacaactggatacccatggcgaccgcaccttgggcctgataaccaagccggacacactggatgttgggtcagacagcgagcgcgcctatgtggaactagccaagaacaatgacgtgagattcggacttgggtggcatgttctgaagaatcgggattatgccatgcgcgatgccagctctgctgagagagataaagccgaggaagaattcctgtccagtggtgtctggacagaactggagtcaaatcaacttggtgcgaaaactttgggaccacgactaagtaacgtcctcattgaccatatcattctctatctttctgctatccagtgcgacgttgaatcaggcatacttggctgcaataccatccttgacaagcttggggcctcgcgggccaccttgtctgatcagagaagataccttggcaaggttggacaagacttttcgatgctcatgcaagctgccgtcaacggcgaatattcgtattattcgttcttcggagacagccgctctgatgagagttaccacaggcgtcttcgtgccgttgtccagactactttgacctccttcgaggggcagatgcgcaaagaaggcaaggcgcgagtcattttcgatgaagaatcagatgataatgagtcggacgagccagaaagacaagagaatttgtgtatgatctcacgatctgactacgtggaagaagtcaagagtctgatgagacgcaaccgcggtcgtgaactgcctggcacctggaaccccatgattattgcggagttgttcagagatcaatgtcagccatggaagaatatagtcggtggatgcatcgctgggatcattcgagctgttcatcaagtcatcaacgacatcctcgagcaggtttctgtcggcaagaccacggaacgcatacgtcgagatatcatcaacccgaagatggaaatgctggtgcagaatctccaagagaaggttaccgagatcctcaatccgcattactcagggcaccctatcacctacaatcattacttgacgactactgtccaggaagtgcaaaagcagcgatatctcaaatcagtcgaggcagctttaaggacctccgatgctattcgaaaggagaaccgtcatatcagcaagattaattatagttctctggctaggtccgtggctcaatacaccgagcaagatatggagcgagttgccagcttgcaagccgtcgactacatggaggcatattacaaggtgactttatttttcttttcctctctgactataatatatccgtctcgctcctttcgtgattttagtatatgcctacgcatactctcaaaccgccaaggactgttgttaataattcttggatacctaggttgccctgaagaacgtgatcgacaacgttggagctctggtcgtggaagcatgcctgatccagaaattaccgactcttttcatggcggacacggtctacgacatgcaagacaccgacgttcaaggcctcgccagcgagggtaaggaagtagtcgaggagaggacaagagcgatgcagaagcttgaaagacttcaaacctgcctccgggacctgaaacggttcgataagcacggctctgctcattcacggtaggccagcagctttccagactgtctctacggtcagaaggaaagtgaaatgaagcgttaaaatgctaagtcagcaacaatagtttgagaagggtgctgtaaagaagacctcgaacgactcttctgctgaatgtattgagagtgatcgggttctttttttcttttctttttgaacttcaaggtacctttttggtcttcggacaattgatgagttaagccaatggcgagaccactgctcttcttattttcagtcatggcggacacagcaatgcgatgtaattgtataccaaaacagctaatgccctttttgcttgtggaacataggaagtcgaagaccgatcacgtcaggggggaattatgagtaagcggatggattctcccatcgggttgaccctttagtttatttttttcaagaatacaaacacgcacttgcggatttttcctttctatcagaagcaagtagatcagcatcttcagacctagtagccgaggagatgggaattagtctgcgtcttcaagtccttgtagtcccctacacatttccgatataattcatgcatctgaatgaaaattacacttcataaaaagtgctaccagccccaaggtacatatattagaaagaattgatattagacaagcagaccgggaccagaccgactcaagtcatttcaatggatgatagtatagataccaggcaataaatccaggcatacgaccttgagcgctatacagcgtcgtactgagaagtgtttgaaattttgtacatatgcaagaaaatgaatgccgtaaatgctcgattcccccatttcgcctttcgaaaccaagacgcctataatgcaggcaaataactgccctcgctaaacctcgtcaacttcgcaattatgaatacaggccattgtctaagaaagacacccaacagacatggacgccgagatggccattcgcttatcgaaatgcatgttgtttcaagtgacgccaggaaccgacaacccggtgctcgatgcctggggttggtgtgttgcttcggccggcgaaatcatccgtcccagaatgaagctgacctttgctaaaagctactgatcgtcgtaacttctcttggcggacagccgtacggcgttgagctcggagttcttcgatacgaccttgtccgacgcggtgcttacgtacgaaacattcatccatcaacgtgttggcatccaacagttttttggggatggtttggacgatctggaatgcctccatggggtctgtgacggcgagtatgtccttttcgcatgctttaaagattgccaaagacacacggaagaaggtcttggagccctcatagaagaagacatcccaaactcggagagtagtttcaagaggtaaacttccgatgaaaaccgacataagccagttggtcagtcccagggttatgtccggcagccgagaattcactgtcaatggaggcattttgccccgtccggacggggttccacccatggaagcgatcttggaatagatgcccggcatggtgtccctgagcaggaccatgagaatccagaggtcaatgttcgcgccttccagactaatttcatgggttccaggcaagtagtctgcggcgataatatgcaacatccagaatgctttttcctcagggaggaagagaaggagcattccggtgatgaaattcagagattgagtatatccgattttcgggttgtgcagcgcataagcatacagaacccgacgtagagactgaatcatctgcgtttctgtagtgacattagaataactcggattgctgctcccggactgttctgcttcctgggtcacctccggtttgaaatggaggttgtcggggaatgtgcggtggagatcacgctcgatgtgctccttgtcgtcgttactcggtgaggtcatggccttcgcaacgagttcatcatactggccaaagttccggttcaaatgctcgtacccgccggcgtaatagaaccaagccgcacctcggaactctggaggaattcctttgcgaacaaatcgcttgactttcgaagactgcggcggaaatattgtgggctctgatatgggaagcccatgttccttgagcaattcacaccatttggctctccgttgcgtcacatggctggagtaggatcctttccaggtctcgtattcatccagggtcacatattgggtagctttgcgaaatccgtaaccgtctcgagggccatctccagagcaaagttgcggcggcactaatcccggaataaaaacttttgtcgagggctgtcgttggtgtgtatgatgcacatcagctgccggcgatgttgggggggtgctatcggagggagcgatatcggagggggtgagatcgcgcggagagtctggcggaacagggtccgacgggtcgggttcaggtggatgttctgggagtgcaggttctaatggtgtgaactctggaggcgattctggaagtatgggcggtatggggttgggttcggaataagccatgtttggcaaaaacaatgagtctggccttgcatcttgagaactgggaaaatgtggcatcgaggatgccggaggaacgtcgctcagcgacggatattctagcggttgtaattcatgtaggttcgaatcgcgtgacggcgggggcgttgctgatggcgctttactccccgcgtgggatttcggcgagccaggctcttcggtcacgtcgctgaagccatcaagatacatggaaatcgcgtcttcgacactcatcccattgtcgtctccataaggcgtatcaggggtatccggtgaaagatcggtgatcgagctgctcttggttaggacactgctgcgctctgttccgcttgcttgttcggcgctcgagcgccaggtttccgaattgacacttggtcgggactgattctcttcggtaggcccgtttgttgggaagcctgtcatggaaatttcctgggggctcatgtcctgaaagcggcgctccatagattcctgcgtccttgggcgcctattattcaacctagaagttgacatggatatacggagaccccctcgggctggcatagctttccgatgcactgcccgttcgaggtcatctcgctcgggccagttcggggaataggtttcaggtggtgtggcgtaagctcgagtgcgaccggcagttctaggggttttccattcgcccctcgtcccgtgagaggggccatagtgaggcggagtgagtggccacgggttgtcatgataattgtgaggccgccgctgaggcgaacgcgatctatggcgaattgcagagcggggggagtgaggtgaggatctcggagcgggatttgcggttcgcgggcgtgggtcgactaaagactccaattgaagagggtgaggaactctgcgccggccgggaaggtcgaaatcagccgagggaggcggatagcgagggtttacgtttcctgtgaccatggccacgatgtcgcacccagttcccgctggacatttgttatcgctgaaggagagctatcgatcgataaccagaaagcattcggaccggaaaaagggagattctcaacaaaagggagtgcgaaagcgctagagaatgaatgaggaatttggagaaacgaaagacacgaagtgagaggccaaattcgggagacacagcctgccagaggactgtggataaaagaagagagaaaaggcgcagttgaaacaaaatcaacaaagccttgatcaggtttagggtcaggtgacgtaatatggacaaaggggcatattgactacaaagcacaaagtatggaggatatagagtggattgaccgttagatatgtactctagaatggtatttgattattctacaacattcgcattgttggaatctttgtataaaactcgataggtcagaaatccatgtgtcgatcaggaactctgggctttaatagtcgcatgttgtatattttatacagcacttgacgccttacgccagctatatgcttcttatttcttagctcaaacaccattaaggggggaagatccgagaaggtatctaaatagacctaagaactaccaaaaaagacacaaaactgcatacggagtcagctgaactcttgttctattttcctacggagtacttagcccctgaattccagaccaatcaaatatcgcaaattaatatttcgactcctcttttgacaactcctaattcatctgcgtatggccgtggaatgttaggccgctcgaacccttccgtcttcggatagcggatgtcaactgtcaactatttcaaattgagctcacattgacgtttccgtattaatttcaagagtctatttctcgcaatgtctccccggaagaaggcatgatttgcgaaccgcacttatgtatatgtgccaggggagctgcagctgcattatactattgaccagtaccagcaatgaacccgtttgcccaatatggctattgtcgacaagcaatcagcgtcttacatccgtccgagtagctgggcagatgtaagtattattaaaatccccactgtggaactgtcattgactaacatgcttttatagggtctgcgaggaattgccgcagtttttgtggtcgcgagccatacctgtctatcctttgcgacatatctgatcccgccatctttcgcggaaacaggaaagtctattttgtttcagcggccgttctttagactagtcatacagggccaggcttgggtagctatcttcatggtgctactcgggttcgtgaatgccttaaaaccgcttcagctagctcgacggggagctacaagcgatgctcttgctacactctcgacaggcgccttccggcgcaagtggagactggtcttccccgctgctctgatgacaattctagcttggctgttgtgtcagtttggtgtctaccaattgggtagaagggtagatgcatactggctcagagcgacaagcccccaacaaagtccatctttgaaaactgccgtcgtggatctgatgcgagagatagtggggacttggatgtacggagaaaatgcctacgaccaaccccaatgggcactactaccccttttccgtggctccctatatgtattcatgaccctgttggctctggtaaacactacaccactgttccgcctctgtgcgcaaatggtcctatacacctatagttgggcaactctggatggtatgtttgggaataatatcgcggtactgaataccccgctaatcatttcttacaggtactgttggtacaaatattttcgctggcatgatactagcggaactatcattatacaacctgatggccctccggccacgtctgctcttcaaattactaccctacgggctagtcaccctaggcctgtacatctgctcgtacccagatcaatacgccgatcaaaccagatggtcttcccagcttgcatcgcttgccgaaatcatcttcccacaagatgccaacgtcagccgctactacgccagccttggggcgcagatgatatgtcttggcgtgatgctttcttcctccatgcgccggatgctctcccatcccgtgctgatgtggcttgggtcgatcagcttcccgctatatcttatccacggaccgttaatgcgatctgttctggtttacctgctgtatcttcccatggcaattggctttgagccggctttaagggcagatggaacaccagatccggagtcttatattccaacgccgagcccattccgacttgggtttattctggttatattttttatgttcttactctatgttgttcagcagtggtcgaagcatatagagccgaagatgggtgcacttacagctgcgcttgagagattctcccgttcatggggtaagagtgcggcgtggacttcgaaagagaagggagagaccttgcctattgcgtctgtacgggagttaaatgtatagaatttttattgggataattattgtgccttggcgtttggggtcgctgacatttggacttactaaagcaatatatgaattgaacctttctaaacgagacgttcgagatttacaacgtttgcaaagtggttagcagctatataataaggctgcttcccactcttgaacttgcattctcgcaaatattttatcactggcgcagtttataacgacagtaaagagtaagaatttctggacaatcgttaagcagaccaaacccagagcaaatttcggcaaagggccgagaatacccgacggtctaaacctgcgcgttctgttctgcggcgcggatatcggaatccttcccccggtgctcgtcatttcttatgacaatctggggagaccttatcgattcagggagtaaaaatccccctttaacaattgcttattgagatatatcagatttgggatcgacgagcttggtacagatcacttggaaattctggaatacaaccgcccagctcgactcatctgtcggccgtccaagacagaggacagatcctgacaacccatctgcaggactgaacagttccttcgttttccataaaagtgacgtactctgtgaatacgtagtgcggtcacataggtactgggtacctataaccgttgcgtttctaatcacattagggtcaacgggttcttcaagaagaagctacctcttaacgactgtattcattcgaattaggtagacatcagacccagcgagagcagcggagtataacgcctattccgacacagcgggatagccaggcgggctgataagttgaggtgaatcatcgtccataatgaggctaaggtcatgccgatagccagcgggaatggtttggatcgtcatatgtataggacaaagtaccaatatatatgaataagtcggagcccttagcagtaagcacgggaaaaaggaagccacttactctcttcttctccgttgcaagccaaacctctttcccgtacttgtgaatccgttcctgttgtgcgttagcaactcaggtctaaaatcagcctcaggtctaaaatcagcatgatagaaaagtgaaattcatctcacttggtagaagcctgggagataatgtctgagaatggggggaggaggtatcgaggtcggtttctgggatagggcaggcgattgtaccgtctggggcgtttcgctgacgacggggtactatgacccacaattgcctagaccccaccgtcgtcttgacccgattcggcagtccaggacctgtacagtattctagcaattgcggagcgaagcaaagcaaagcaattaaatcagaagcctcgagtatgtatcacgtgaggggtcttttcgcatggacaaaatcgtaacaaggtgatcggtgagatttggcagagaatgaatacgaactaggcctaatctagttaactatagggagacccctccgcctgattctgcttgattccgccttacacagaaggcatcaattatttctgccagacttaatagagcagttcttgaattagttgctcaaggatggtctatatgataaaagtgactaaattttgttaacggtctctatacaaattgtaggtatctaccgtcttgctgagttcaacaccaaggcggtgtggagggcggtaatctgaatcccgaaaaatcagacggtgggttgggggtcgcattagccaaagggggtccactaactatactccgtaacccttcgcgtactagttacttaccttaggcactttgaatatgtctagaaaaggacgcggtctacaagctaggtctattgttctcagtaaaaaacccgagcttgccgtatttatttcgctttcccacttcatcaaaagacatcctgcattccctacatttacgcaatgtctactatttccgccttgaagcatatagttcgtcgccttattgaacacaagattgacatcaaagacttggaaacaatcctggacaatcctatgccgctcgtagtagactcgttgaccctgcaagatttccagaagatccttagtctcaccatggttgtggataatgagttcgactttattgcgcctgtccccatcccgccagatctcagtatgttagcctggatagtacaaagaaatcagctaacctccactagaactttggctggaaaaattcgaccgcgctcatggcaccagtcgcgatgaagccctcatccgctgcaagctaaacctcctccttgtctgtgctcacgatctagtattgtcgtcttttgagcaaatccgctcgacccattaacatatagatggaacggatatgggcgtatagccctgtgaaatggaaggggaagacatgggtactgtcggggcggccagactacggcatttggtacggagaggaggaagacatcgacttaaacgttgtcatcatggaggccaagaaactggccagtggtaccgtagggattccgcaggcgctggcatatatgggtaagtacatcatggtatcgtcggcataatgcactcttgggctgacctgtcaaaagggtgcgtccacaagcagcgcaaagaacttggcaaggcagacaccactgtctacggaatttccaccgataccattactttcacgttcatgaagctcgacaatgagtctcgggtaagtgtatctaaatcgtgtcagtaaccctgattttaatgtttaccagtggtcattcaaaatggtcggtgtcgttggaaatgggttcgaacaagtgcttggtctgctagtctacctgatggagaaagcagcttcgatatcacctgccgcctctgaacacacgtctcgccggacacaagaagaatcatgggagtctgacctgatcttcgactatgaccctgagatggatgttgagacagatgtcgagacagatgaatggtttggtcccgcattcgtcctctaaccttcttttgcgtcttcctgctcttctttgctggtcgttcttccgtcttgatatccttcttcgttagttgactacctagttcccgcggacctacttggggaactatataagtaggccactcccccgagtcagacaatctttcatatatatttcaggatatcgcgaaatgtcctgacttgtaaaaatgtctcgcaaaaaggtctaattaactgctttcgcctctttgaatcaggaatggagagacccatccgattctcaattcagcatttgaagcaagataccccggctactattgatgatgggcagtacaaggtcctcaggccaagggtggttttgaattcggcaacaaacaaccagggacaagagtttggtacttcgtcgggtgtccttgttcaagacacaggtggttataggtacatggcagctgcctcacatggattctctgtagaggggaaggtttatctccctagtgcctctggtcttaaaagagaacgtatcattgaacttacgcataccgatattgcgctcacgacagggtgcagtttgtgaatgaaccattggccctagttaaatatatagatgctgttcttacatacaagagcgcaaatatccaaaatgttgattgatgttgaatccttgattacttactgctcttgccacagtgcatgggtcgggggcattatgcctttaataattggcactagactattcatccgtatgggtttggtgaggaacaaatccataccagacccagtcgcgtcgcgttgcgtgtcggcttgtgcaacgccagtcaaggcagcaatcgtgacacggggtttggtttccagtgttttctcatactcccggattcgcctagtagattccaggccatccatgactggcatggagatatctgtgaagattattagattgacaatgcccgcgttaatgtttaaaaggcctacccataaaaatcattccaacggcagaggaattcgccttgaaaacctcgagggcttcttctccgttttgcgcaatgacataatcgcaattcagcttcttcatgaaggcaataagaattctgagattgatctcattatcatccacaagaagaacggttgttggagtggttgatatggggctattttcttttttgatgggtgtatcgtggctcgtggtggcgacttcttcggatggaaaaagatagtcgtcaacattctcccgacagagtctcaaagattcgagctttgctgtgttggcccgggtatgtgtttttggatctgctatcacttgggtcgtggattggtcactaccatgaccgtttgacgacgggctaagaagcgagtccatctcaggctcatcggtgctgatgtcggctccgaagctccctgagccacccggtctgcattcttcgcctcggagagaatcaaaccgcacctgctggcggttgatacacgattgtaatgcttttgccaacttgcgcggaccgcatggctggctaatgaactcgagcacatttgtatcgccacgatttcgagctccgactgacatcgagtgcgcgaccctcggggacgggcatattacgatgaccggcgaagggattttaacacctggactaggtgcaatagccctgatctcctgattccctatatccagatattcgtgagaagatatgtataagtcacagtgggcgaattgtgtttgtgaagccccaactaaaagaacttccatggagaagcaatctgcacacagcctttgtaacgatgtgcatagagctgtgtctaattcagaagtcccgaagcctaatattccaatggtcttcccgcatgcaagagatttcgctgtggtgatgagagactgattgttcaacttgtcaagattgtccaaagcagacgcttgattaagaatcacagttgccacgacttcagtgccaacattcttcttggagttgacctggatgtcaccgccaagggatgcgagtaatcgttgtgtgatgcttaatccaagaccattgccggttgtcatgctatcttcctgtgagaaagcagtgaatagtccatttttcaaaaattccgggtcaatcccagatccagtgtccttgacagtcacggtgactgttgagcttgtggcgtcgccgctttttccaaaattcactggagaggccttcatggagatgtagatataccccttgtgagtgaatttcaaggcattcccgaagatgttggtgaggataacattccaggccccagcttgtgtcaaaaatttccaactgtgggtgcggtcaatatccaagatcacctggactccaccccgtgtatcggaatgtttgctaccgaagatagaagcgccggcaataccccgaaggggagatcttgaacagctgaagaaggaataaccagcgaagaccgtttcaactgcgtcttctaagatagcatcaagttcgacacaggtgtcgacatcatttgttgaatgcaaaggagggcgggctgcggtaattttcgggttgacagaaattttaggaaaacgaccaccggggagtttggcgacagagtttggtcgaacatcattgatactagcatgctcgaggagttgattgatggagcctagtagtgtgtatgcacaagaggagattgtatgaacaaatcctcgttgtagcgcgtccatggcggtgtcatttaatagttctgccgttccgaaaatcccatgcagaggcgaccgaagttcatgactcagtccggagagcaagtctgatgttgctcgatcggcgaaatgagcgccgagtcgatgcacctccgccatgacgctagttccaaatgtcaagaggaatgctagctcatcattcgaagtgaagacacggtggtgttcttttgtccacgccagagcccccgagtaccatctatccttgtgcgaatcccataaaggtgagaatatgatgcttcgggattctggggcaattcgaagcaagctctgggcatcctggcgcacgagtgactttcgtgttcttttgtacctattgcccccgggacgtcgcaaaaatcggttgaccactccatcactggtatcatcagacgatattgtcccatcttcactaaaattgaagatcttcccttggggatatcggtgcaaaaggcccccgaggaatgactccgacaatgcgattttgttatcgtccaacgactgaccattgatgctagagacatccgaattggcaaatccgagtatttcgcacgggttcaaagtagttttgcctgagttttccgcttgttctggatcagaaaagatctgatcttcgaatgaaggttgcggggagcttcggaatgtggcctcatcacccgaagaacagctctcaaacccactgccttcagtatcagactctgcattgtccactaaagcttcctgggagcggaaattggcgttgaaaaagacaactgcctcaacttcgatactctcgcggacgagattggctgcacgtccaaatgtttcattcactttagcagtataatcatccttcagtgatgtctggctttgatcactgccagttgtcatagccgcttgggaagtttcttcgagttttggtagagccttgtcatctctcttggtagtcgagttgaatgaatgatatttctccctatacccttgcggggtcttttttctagggaaatgaagattgtatggacgggaagacaggtggcttggcatgccattctgagccacggtctgagtgacatcattcaagacctgcttttcttgctgttcacgattgacatgcccttctgcatggtccattccatcaaacatggggtgagaggcgtcagcgtcgagaacccatgacttgcgcagactaccctttccctccaaaaaacttccaaggccaaccatcatgcgctcactgcggaaacgttgggctttggagtgactagttcccagatagtccatgacggtagctgcgatatcgaccaggaattggagtgtctcaccgcccaggggctcgggctcgtgaggttgatcgtctaagatcgtataggctccaatcaccacacctttcggactgatgataggactcgatgcgaggaaccgaatgtttggaaatgaagtcacatctggatgatccttgaatgcattatctttggtaagatcgggcacaaccaagactccgtccctggcatttgacggatttggcgtagaatgcataaccgatttacacaggctgcggtcataagacatagtacaacacccgacccaaagctcgtctcgcgcattatgctcgccatcattctgcaagctcagggttcgagtggcttcggtgagaacgtgttgctcgtttcggccgaaaagcgagatcaacgcacgctgcgcatctagtcgcaaggtgcccaattgggcgaatgccgtcaggacagggtcatctgaggatcgagcaacatgttcttttgatagtgtagcaggcccgacgtgttggagggcgtgtggtttgagatggtagggcggtaaatacctaggaaacaaggtgtatggttagcctacagggtcttcggtcgagtgttatatagatcacaagaccgatgtatgagtacaatgttgcgtttacaaacaaaggtggtatattacttatagaattctcgctctctggatgtgccaaacttgacctgatacttctgagcgtgtggtgatgtgattggacgtgacattgcgccggcggcagttctgatatattgaatgcaataatgctaaaaagacagaatgtatgcttcgcccttggaatagcttggcggatcatcaagaaggctgcaccgggctctcggacttcagaaaatgagtagaaaaagaaagaaagtgagcggggcggccagacgagcttgcagcccgcaagcttccaatcttagacggctgagactttcggggttccgagattgggctcggcctagccaatagattagataagcggtgacatgggacgggaatgtttggcagaagacagccaatcagaggtgaacccgacatttaagtctatctcggctatgctctgtcattggtccaatcgggattgcaagatacgtccacgggttacaagccagtagatgagatcatgaagcaaaatatgatatgtagaaggagagtagaccaagactgtaagagtctactattacgagatggaattacagcccccagggtccttgagttctgcttctaaaggcgcttccaaggttctttatttagcatggcgaaattaccaaagagaagcgtggcaaaattagaacataactagcgattagttatgtcttcaacgcttatataataatgcatgcagctgtttaactagttagttaccatgctaaccgctggatgaggtactaacttgatcttaacttcgattgagggctgcaaaagaaagttgaagctgtgcaattctagaacataaattcaaaaaaagaaagatttattgacttgacatgaaagttgttcctatctgctataacaatcggcaatgcttcaggtagggggttgccaatcttatcccgaagatagctgtcgataacagccaggaaaatgcaagggggagactccttcatatgatgcgctcgagtatcgcgcatagaaatatcatacatgccgacatcccgggcgagaaccttgagggcttggaccaaaaataacctcggctagatttacagtctaattacgatactaacagatataacgcacaccattataattcacacctcgtttaaaggctctgatattcaattgctagctaaaagacagccgtcaaggtcaggccaacccatgctatttgacatcaaacaccgaagatcagaccaaacaaacatacccactgccaattccagcggagcccttatctccatacatctctcacagtcgaacattctagctatcgcaagacgaaacacggaagctacccatgttcctgctcaaagtgtggtcattccagtcatcagatgcaattccaatctggttgctgcaagacttgtcgctgtagacacgaagaacacaatcggaccacaagttgttctcccagtcaatagtgtcaccgcttttgcaggaggacttagtgcagcccttgttgtcttcgctgtcccactgcccgctgcaggtggtgaagatccaggcgttggccataggaaggatggcggcgatggcggcgatggtggtggtggtgaacttcattttgtttcgaagttgatggtcgggtttgagtggttgaaatacttaagtagggagttgaaaatagatgtggattgaatctttggtatcagaattgagatggagatttgattgtatctgaggggatgtcaggagcgtaaaagcaagggcaagtggttatttatatagctttctaggtggtatcgagtcttctattgataaattgaaatatgtaacttcatcgatgcaatacgagtgctaggcacaatacgagcatttgccagtgaagccgaaatagaaaacacgagagatcagcatcgtcaacggggccatgattccaatctccagggtcaaatacgataactattaccatcttcagtggatgatacaggtgattggtaggtacctagggagtccactgtctatagggcggaggtggtgaggtagcgatgtcgatcagaagtgaacatcgctctatttagggctagaaaaatgaccggggaatagatcatctatagcttctcgtattctcattttgaaactcatctactcaaagcagaagatattatttttggatgacctttataccatgctgccactcgcccaatacagacctgcaattgataggaggactaggttaacatattatgtctaggaaaaatcgttatcgtgaagatatttttcttcaagctcaagtatgatccagggtctatttatggatgtggtgctaacccccgcataaatgatcgacagggtccaaggcccaatatgcccggacaatccatgtcatatattttaagccaagactcgggttcagcctgcttctcttggcatctcgtgttcgtggagctacaggaatacgaaacgtaacacaacttaagaaatacctagtatgacgcacttggcatgtctgtcactaaaaataaaaagaataagcagcaacagggacagcagatcttcctgctgaatctttacaacaaaagagtgcattcaaacgagattattaagtacggggagagaaagaaaaaagaagggaagaggaccggggctgtaaggttattgtgtgtcccttttgcaaaccatgcaaatccttaatgcgctcgctttgttccatacgaggaaggaaccaacaatccttcagatcgtaacaagccggaagtccttaatagtctatgccaaattcaacgtcgctttacctctcatggatttaccgaaccggtaaaatatcacgggcattgggatcatagccagagtaacaaagcccagtaaagaatttccccacccataacccagcgcctggtacatgtagggaccagccaggggtagcaacgcgccgaacaaagagcgactcacggtaatggctgcgactgcagatgctgcatatcgtgggtatgaatcaatgacgtaggtctgcaaagtcccaaaaatacccaccatcccaaatgcgaatgggaaaagcccaattataggaacaatccaatgcgtgtgcgcttgaaccgaccatccgtaccaaaaaaatgatattggaatgaaaaaggcgaagaatatcgataaggggagacgcatttctggttcaaaactgccattgttgcggctcttaagtcgcagaatgattttatcactcagcagagcaaagagacattgcccacagaaaaagccgagaccaagcccaatgtatgacagtccactgatttgaatactccagccataggtattctggaaaacattggtcactgtggtgaagagaaggtagaggcagccgtaaaccgtggcgatatacaaagcaatgatcgacacgataggggagcggaaaagaagctgaagaggggtttttaacccatttctgaggcgatccatttgctttctttgaggacccccctttttttcataacaactgtaaagatcaggtcgttgaagctctgatcgcaatgagtctgtcttgcgctgcatgatgataattgggtttgtttcgcgattgaaaatcgctacaagagttgccactgtgccacccacaattaaaagaacccagaagacctattttggttaatttccatcttttgagtagtcaaggaagtctactaacccatcgccatccggcgccgtgggcaatgaacccaccacaaattggaccaagcactggcccgaacaatggcccaaaggaaaatattgacattgcgagtcctcgctgctctgctgcgaataaatccgagacaacaccaccgccaatggtcaagcatgcagaaccgccaataccggtgaggagacggaagacaatcaatgcagacagattcggggcaagggcacagccaatttggaaaaccacgaagaaacaatttgcgacgctgagtacaattctccgtccgtaaatctcgcttagcggggaaaaaagcaaaggtccgctctgcgctctttgttaggtcaatgtcatccagagagcgcccaggaccgtaatatacttactccatatccaaatagatagcctgtcacggccaatgactcacgaagcgaagacttattgccgaactctttacttgcgtctgcaacggctggagcgaaaacagatgatgcaaatgggcttcgaggtaggtggtcaggataatggacgtataattaaagttggaagaatattgcatacctaatcaatgtaatgatgctgacgagtgagagaaggaaccactttcgtgtagcagggtaatttctgtatgaccaattagatcttaacagctgtgggataacgtaaattggacgtaccttgggttgagagggtcatcttggctatcccacccaactatgccggtttcaagatttgttagggggaactgctcccgcttgatagtcggattcacctgattcaaaccagccaatcagtaaaatcaacgagaaaattgcatagagcagataaaatcactttagcgttctccatactgattactatcagttgtcgattgcgattttgtggactcacaactgtcgagatacaggatttcacaaatcttccgtagacaaaaggagtatctgaataggtgacatatatataagataaaaatttaccatttcaaacaatataccattttcggaaaacaaatggaatcggacttaaaatacgggctaacctaaaaagcggactccggggaagtcttgggccgattgaagaatgcatgggctttgccactaccaacgtgccgcctcagccgagtgcgacagagtgcacgatgaccatggatcgctatatttctaattcccggctaatttgtcttttgagtatagttcctgtgcgtgcctaccacgactagttccagacttgtcgagatatctagaccactatgatttggacgaagctattattcggaaaagaacgtggaactagcatcgactttctccagtgatactgaatgctgtgctgattagccatgagcggtatttataagtacatcggtttcgttaactacctctcgtctattctaatttgacattggcaatataacctatatgttcatcgcagatacaacttgagtaactagcaacatggtttaatcaaatgaagacgaagagttacaatggaaaaaccaccctcccgtttcctccagcacaaaatctgatcagatgcgaggtcttatgattcgagaatggtgacgaggtacagaagtccatcacagatgcacattgaagaaatcggcaatttgttcatacctggcgaagttattaacgataaattgcgcgcgttagaatcatcttgcttacccccttgtgaactccttggaattctgctcattttccatgttcgcacgagatcccatccacccatggaacattgtttcgtatagttcaaattcaacatcaacattagcgcgcatggcttgctcatattctttcaaaacatcggcttgctcttccggggacgataggcagatgtgggggatgttggtggctttagcgtccgcaatatcaagaaggctgaagcagaacatatcaatactgaagaccaaaccagaccacaagagactcacgatgggtgggcttggccagaaaccttaaaataactccgaccaccagaagccaaagcagcaagctgtccaatacatcagtaaatttttatcgtcgtgggataggttttatccataacctacctttcctccccagcacagtccaagaacaccccaactcttgacttgggggtacaaatcctcgctttgcttcatgatatccagaagagtagataggtttttttccgggctagcattctccccaaagaaggtcatcatgttgtttcgcttctcctcggtgtccatggcgacccaatccatgctagctgccttgcctctaaagaaatccggaattatcacgagacattccagcttttgtgcgaggatagaggccccttgtatagtctgcgggtaaagaccgaaaatgtcatacacgagcatcactccacgttcagatgaacggtcacccacgatatctgccaatttggtttcccgaattagctacccatatgatttctttgcttccttcatattggactcacgcaaacggacttccgcagctacatcagtgccttgctcggtagatatgaccggctttccaatggcgggtgttgaacagcatgatttggaggacattttgggtctttgtaactcagcttcctgtctggctaacgaaccggacaaatcgagcattcagtgttgggactctatcgtgggaggcactaggaggtttatataagtgtcacagcaagtatccatttgaaccgcttcgtcatttgtccgtgcgcaaagtctcggtattaccggacttaaagggaatcgaaagtctgccggactctacaaagcattcgttttgtaactacatttagttcaagagctatgtgtagtcgacatgtcccttgctcaataccagaccgtgcatcactttgatgggggtctctcaccttctcatcacccaagaatgcatcctgaatagtgggatagatatttttctattttggagcatcgatttcagacgattgtctttcaaacatgacccttgaggaaactctattgacgccaagaattgagctcggaccgccatgaaacggcgctaacccaaaaaccggacttagatagcacgtcgggattttgagtctcggacgcacttgcaaattacaccgtgaattagcgctatcccaaaaagaaactgggcaagacattgactgtgaataggcgataatattcccatcgcttaataggccaagtaagtagtaatacgaatggtgaaaaagagtatttgttgaaatatcagaaaacctatgctacttgtattcttaaaggctcataatcaatccaggaagaggtttcagtattgtggcattcttcaaaagcccgtgccctgaaatgcggccgcttattgccgagtccgtcgcatgtctgagatgaacagctttgtgtataagacttgatccggatcctcgcgatagaagagcattgccattttatctcttctggccagcccttccattcatctgatccacctgatctgacctgttcgcactttcagggacaatcaagccgaaacataatgcaaaatgttctttttttcttcattgaagtcgcattctgtatggtgaccatcgtgtcagctcagatcccagagtcggacaccgttttacaagtgcagtacgggagtgtcacgtttaagaccggagagaagctgaggttaagtggtatggaatagtaacaaggcagaagaaagaccagacgaagctgatagagccgatcttattccagacattacatcagcccccagtattggtctctcagcacctgccctgacaggcacgtatattgtcatcatggtaccgccttcctgtccctattatacccatccacttcctcgacttaactcaactcagatcgatcccgacgcacctgaccccacacttcccatcttcactcaggttcttcactgggtacagcaggaccttatcttctcgccaatggccggaaaatacaatacattcgttccccttattactccgtcacccgcacccgctgccgctccgtacctaccgcctatgccaccaccactcttagctccacataggtacatccaaaccctattcagacaacctgctgagttctcaataaatgacctcgatctctacctggccgactctatcttgagatttggatttaacttatccagatttgcccaggaaaatatgttgggggagcctattgcatcaaatttcttcttagcgggagacgagactatccaaatcaggtgatagacttgctgaaataattcaaactgcgagtttcccatatttgccttgtttatcggtccttgggttggtccccggtctgaatagccccttacttaagcgtcaatggaaccggaatcatttacacatgccgtaggcaccctaggcaattctaaattagattaggaggaatattaacgccagtaaatccgcaatatccgctataaagatgggttttccaaacccaactgacgattaataaccaaaacatgataaccaagtccaattcgattcgcgacagtctcgtaaaactggagtgggtctatacatcggccacgctaacccaaaatacggggtttacttactccaagggtgaagaacttggcggctgttttcctaaagccgcatgcttaactccgggaggcagtttcctgatctggtgcagattaaggtctagtctatgtcgttcggattagacctcgtatgtaggccttgctgagatggaattatccccccggtatcagatcaaaatgagtcgttttcttacacagagtttaaggcttccgtagacgtaaatgaagtgtgcataagaaaagggatgcaacggatgtgccgtgcttgccatattccggttgtcacgtgatagtatctgagataatgacgccttggggtggcaggaggtggccttttcagcttcatgaatgcccagtacgattaccagccatcgcataggcggcccttttccccctgaaattatggctacccacagctttcaactgcgtggaaatttcggccttggtggaccgtctctgtcaagcaactcttccgagaacacccaccaacagaagcagtctcggcctggaggatacgaggctaacacatctcccacaaatcctgatatccagcacatgtcagtccaaacaaccagtaaaaaggtctcttgtacctcctgccgacaacgtaaaatcaagtgtgacaaagaaaatccatgcagccaatgcacatcctcattttacggtaggacgcaatttccataccaaaacaaaacattgcattgcactgggaaaacactgatactgaaactttgaagattgcatataccccgaatcttcacgtaaacgacggcggaaactccctttggagcgaatagagtcacttgaatccagactgaaagcgatagaatcatccatctcaacgaacgcggaaagttcccccatgattcctagtcccattacatcggaaattgggaatattacgaataagactcctctggctacaccaaacgaacataccgcgcccgcagagcttgggaatcgtgataaagtataccacgccgttgaacaggatgaaatcgagtttcaagggtattctgcggatcgatcttttattcagtgtctaaatgcgaagctaggtgactggcgtggcggtgatatgacttggcaacagctcccctctcgtatatcagcgccagcattctttgaagtcgagggtcgaactcccgctcgagtcactttacctgaaagagatatcgcagccaggctggtcgacgcagctttggatgcacagatactactctgccttgtacaccgaccaagctttgaggtttctttcaacttggtctattcgcttgaagaagccaactacagtgccaaagagcagaaatttctaccgcttctctatgccatatttgcgtatgggtgcctggtcatagaccccggctcgtacggtcccgattgtgataaaaaggtgtctcaggggtattgatttccaaagttttcccgtattcttgctcaggctcttacataaagcaggttggaattctacgcaaagagtcgacaactccagaatcttgccgagtgcagagatttaacatctctccaagccatcatgtttttgaacctctttcttctttcgtccaaccgaatatcgacgtgctatacatatctcagtgcctcattatcgattgcgctacgcatgggtctccaccggtctctcaaaacgggtcaggatttaatttcccaggaaatgagcaagaggatattttggacgctgaggcttcttgtcaatgacgttgccaccgcaagcggtatgcctgttcttctgagcgatgatgaaattgaccaagagcttccaaaagagacaaatgacataaatattgaaaagatgaggatttctccacagccgcgcggtgagatatgctatatatccggtgcgaattcatacaagcgactacaaatggttagggacaaggtgacccactgtgtctactctctcaaaggccagaccacgtctgatatgaatggtttaccaattcatggtgtgagcttggcattgatacacggaatacagggtgaccttgacaattgggtggatgatatacctatgggttatcgtcttgggacctgttacaccgaagccagattgataaggtaggaaatttggacatcatccttcacttgcgagagagcttgctgatgactcccagggcccaatttattctagctatgtcatatgctcatgttcagctctatctctatcggcccttcttgcattatgctgtgagatctctcaacgagcaggttggtatgtcaacttatgcgactgcatcggttcgggctagtgaaaatattatcgccctgtgtgaagggatgtatggacaagatctcctcaagggtgatttgtggcctgtgacgcacatgttgacaagctctattctgacaattttgtattttgttgtggtttctcgagcctcgcctaaaacagacatgcttcttgggagcttgatagctgggcgaagagttctaaatcaccttgctgaacatagtcttttcgccaatcgaggtaaagtcatgctgacggtgagcattaatcagcctgtggctccttttgtcgctgttcactaacatgtacaataaagatcatgatctccaccctcccgggaactcttcgacatatccaagaaaagcttcttcgctcggatacccaagaactccccgggcttcaaaatgagaggcttgcgagctattcaggtccttttgataatgcactcaattcccggctggcgtctgaaaccttctcgctgtctccaaaacaaagtcctgtcggctcattgccagcctctaccgccgctgagtggggagcaaaccctagtaaatccctcaattcatcaactgtgctcagtgatagccaatggaatcccagggtttcaaatgcacaacattcgacaatcggtactttccagcaagacttggctggaacatcggaattttgcaaagctcatgattcctcgaatgaatcaaatagccatccgattattggggaagaccagacctatcctcgaagtcagaacttggaagagatgggagttatagacgaattccttcaagctcagccgttgaatcttcaacaagactgtattgatgagacttggttcagcgctttgaagatggctggcttggattgttcagatgactttcagagttctatttcacgcttggaatgtttagagcagactttcgatttcgatggctgattatggcgcaatagcattatccccagagttaggggacgagcaattgggcattcttttctccggcggataagaggggagtcgaattacggcgaagtctttggcgatggttttggggttggggcttcgcaattgtcccttcatatgcctcggggcttaatgggatcagcttgtgtagtagattcccacggattaccacaccaaagatccagaattagggattacacattgttactcaactcacggcgccttgccggcagttggaatattggcttgattatccacatgtatgggcgacggatcggaccactacgacaaaactaatttttggctcaccgctctaatcaccgcctgtatgattatggtcttgggcctgtatataatattgcaacctccatcaattaacattgtaccttttgaagagtagattacctctctctataatggcagcactatatctgagagaggggagtgtactatgtgaagaatgcgtatgctctggaaaatatcaatttgcgtagggagaagatggtggtatgtatgtatgtatctggtcgacaattaataagaaaaccaagttaagaataactacacagaatgtattaatttgtataatacaaaggcggaaactccagcggtgaaaataatatatgtattactaagcatattccagtttggcccatttcggctgccctagaaattcttgacacgaagattccgaacataatctacgttacttagcgtgatcgctggaatcgtgactacgtttactggatcctcgtttgaaccttccgacctcacaatgcctgcactgctctgtttaaaaacaatcccatcacgtggcatccgcttccgatttggcgacgttatccccacctcccgacctcgcaatccttggtaatattatatggagacactttagagtacgtagcgacttccgtacatcaagccaattcatgtcgcacattgcttgaaagtgtggtagcagcttcttcgtgcaattccgcaataccattattgggtacctcttgaattagccccccgtgcacttgatcagtaacagtgctatggccatacaaatgatcggcagggtctgactgtgaccccccggtgtatcccttttttccgggctcatcctttcggacggcatcataagtctgatctttccatttgcggaagccccaggagatagcgccaataatgagtgcggcgccaccgacactgccaacaactgcactcgcgattactccgtcagaaattttatcactgtcaccgccaccggtagacgtgtcattggctttggaagcagcgccactgtcgttttctgtgttatttgcaacactaccggaagtctgtgaaattatcagattggacaccaggatattcacgacgttcaatgtgttcccgaagctgggggcgtagtcataaacagaagaggtccagtctgagccgcatacagtatgattgcttgtcccgccgcattgctgtgctagcgtgatggctgtgcggcgtagtttagcattgatcctgttggcgacctctggcatcaaatttgatacactcgaaagccataaggctaaaaaccctttacctgcctctgttgaatatcgggcctggttcaccgcaccaagtccatcaaccagatcccctacttccactatcatgttccgggtgaaaaatgatgttaaggtgttgtccaataggccttcgactcttgttttccatagatcagtatccgtctgtacctaccttgtcagcactctatagacccttttggacgacaaaaagaacaacaggagaactcaaagagcaaggcaaggagcacttctctgcggaggcaactcaccattttgaacatatacgcagcgccgctcagccacagtccataagaggatgctaacctccaatccttcaatacaaaacaagcagtattgttatccatcccagcaacaagggaattgatcgtccaatcgctctcgttcaggatgtgatttttcacgctccacgaccaaacagccgaagcccgatccgcaaaaaaacgtcgttgctcccccgacgaagcgtaagcaattcgggaagttagctggaaatatgtaccagtaaggtacccaaactgttgcccgatgaggttttgggagtctggtgaaagcccatcggtacaaaagtgaccgcttttccacatgagtttgctgtgcagatttacagcgcaattaaaccaagactccgacgaatcggtcggaaagcctacttctgcggcggtcatagcggctagaccccagatagcggtgcttggtcttgtgttggttgaattgtagctcgaattgaatattgttggtctttggctgtccatgcggtcaatgacgaggttgttgtaattactgttcttggtcgtgtcccagaaagcgagcaaagtaatgtataccgatgcctcatcctttacaccgtgaaaaggatcatcgcttagagggctcacgctgccgtcgatggtagaattgctgagaaggttcgtgacttggattgtcgcagcattttgaattgattctgggccctattagttcatgtgctaaaccatatgacactttcgtacttggcaacatacctgtgctattgatatctaaatcaatagcagaaaccctcgtgaggctgctcattaaccatgccgcgtagcctaggtggcagtaaatcatcgcaatatggcgaacggggatgatttacaggtaacacgaaggagagacgcgattagggatcaaataaacaatgcgctgccgcgtgtcttacgttacaagatgtattacacccttacctgcgttccaatcagggtcccactaaagtggttcgttcacatggtataggtaatttcgcgggtgtcgtgccaactgatttgatttttcaataccgtagatattttatcttaaaagttattcacattaccaagctgggttgaatacctggggtactcattgaaagcaattcaaaacgtagaacagaaatgcagacagctgagttggtccaagtcacagcaattagatccggacatgtgatttgaagcctgtaaccatatttcccgggttgtatgctatggcagtattctgtaactatggcatccttataatttaacattcctagggagttgtgacagtgatgttcgtgatcgatcagctttgattccacaacaactctcacacttggggctttgcggaacctcacctaaagcactctagtccttattaggaccgcgactcgcccaaatctcatctaccagtgtacccttgtgagtcaggttgaaatacagatgtaattaatatctggcgacgtgccaatacactggcgaattgggaacggtacctcaaagaaatgtctaataactttgaattaattatcgtaaggcttagccgctcgtttcgttgataacgtcaaaagctcgaaaagttgttgcgccaactacgttggattcacattcattgctcattcttagtggaaggagaatcatacggtgcagtgcgtaggtttataggtactggaaaaaaacacctagctcgattaaaaaagtgcgcaattgtttcaggtctaaaaaccaatcgcaggcaatcaaaaagcgaatccctctgtcccttgcgacaaaattgtcaatgcaagggccacagtccccattcgtgcatataactaaggaggtcgccagggttttatggaaagattatatattgcacatttagtgtcacattcctcacttccaatgctattgcgagtcacattctcgccagctcggtcaacttgtttgaggtgcttcagttttcctgtatgactagagactgaagttcttctatgatggtaaagcatccagtataggagtaagttggttaaaacttctggtggtggaacaaaaagctcatttagggcagaacaaatgactttgagcgatttattagtgccctcgggcagtcaacagggacaagaagagttatggattagcggcaacggatcacctagcactgcggtcttatacggaacgcattagaccgtagcgtcaaatagagcccgtcggcgctcccttggacggacgcaatgtgtctttattgcactagtttatatacagagggaaggcgggagggacaaaatcaagtcttgactgcgtgtgcagtcagatacacccgcaatcatcatccgcgcaacggaaatcggatctttgtttatcagcccctacgaatcgcggagaacttaccagtcctcgtcgacgtcgactttctcgcagagaatgatgacccgatggcagtgagtgcgagagtcacttgtgatctattcttgagttcatacgcgctgtttgaacggtttccggataccatgaggtctctcaagggtgctttgatgcgcaaatggcatgatcttacagatgaacctgatttgacatgtttgatcccgttacttcatggatatggcccctttgatacgaaaacaattcaccgtcttcagatcgagcttacgacgaagaagccttcatcctcgtcaagcccacattggctcaccagctgaaagccacagcggcggtagctcagctacctccgagtttaaaaatgacgaggaagtagaagactatggtgtggtaagctttctgccaattgaagaaaagaaaaactctggtctctacaacatgaatatgctgtgtccacctttccccgtgcttctccagggtatcaacaagatttcgagtttcggccagtctcaaaaaaaatactaccccctcatcatttacctcgaattctcaaggctcgttcgaggaaattcgcgtaagagcggctggatcagagtctggatggtcacgcgtctttgccaagaagggaaaatacatcaatgatgaactcatcgcattccatacgattggtaagactgtggcgatgaccaaattcgaatacgtgctgcttcccatcttcgacctggtcaatcaatatgacacatagaaggccaatctctcagtggacgttctgagttccgctctattcacttgtgcgccgttgactagatatttccgagaaagggcggatatattcttcctgaacctcgccatcggggtccgactggcgaccgagctgaatgaagtattgtccgaaaccttcgggtgggctggaatttaatgctgggaggaacccagacatctctgttggttcgaccgaaggcatgcagctacagctattgccactaccagaagaaaacaaatatttgtcttcacagttgacggtagatctgaacatagatttcttcgccttcttgttctcttcaaacctccgaccggacgatgtctttttgaagaaaagccgatgaaacgtatcagcttcaacagcggttttcgcacacggggaagagtcacaggggacaattattcgtcggatttcggcggccaggcgggctggtatggtggtattgaaacccccctccccccaagacttctgatccaatttgatatgattagtctgatttattgactttggttagatttccccccacgcatgcattcgggaaagcatctttgccgagccacggatcgatcaccacttcgcatacgcaggcatcttgaccgagttcgaactggatacatctagattatcggtcgatgtgggatgctgcatgggcactgacatccggaaactggattgatgggctgtgtggttagctttattcttacaatcttctgttcaatgcccgacacaattgcgtcaattagatatagacccttctgatcgaatgtaccagggtcaatatgctatacagctggtgtggggtcgatgtcactttatttttggattttctttattttcgttttcggcataatgtacttttgacattctacatatactacaacacatattacagtgggcacagctggaatcctcaagtagtagccttgtctcttaggcagagagaaagtttaggggccttcatgtgaactagaatcccagagcaggacttggaccagtcaccacagaatgaaaaaggagtttacaggatgctcttgcattagaggataaggatgtctactacggtttgtataatctccataatagctgacctctctggatggttggtgttattgtgtcgctctcgtcttgtctgttatgccatactgcctaccgtgcatatccctcttcaatatatatatactgtcttggttcagcgtcccaggtcagtggtcactttatacacaccaaagtatgaggtgagttaaccaatcgtcattcactggctcagcacattcctcacaaccatcttcaagtccaaagcagggacactcaggagtttatttccagatggatcgtcgggagcgaccacaatatgtcccatcagcctggaataggtgcacggccaataatttcaagaaacagtaatgatagccccgagcaaacttctcacgaccttgcgcgagtacgtcttatgtgttggcacgggtgattctccatttagacccgctttccacttccagtatttccaagatgtcgttctgcgttgtagtcaccgaactgatgcaaaaaaacttgttggccattgcggggggcaaggtgcagcgcacgccctgttgtaccgacgatagcgttcagaagttggttgcggataagggctcgtttcccgaatcgtaaatcacggcggatttggcggcaaggttgaagccgggggcgccggggtttttgagcaagacctggaattgctgcgtacccaaggcctttgaccatctcaaccccgagaaaaccccgagactgcctcctacctgtggataattgtcgctagaacctatttagttaaatatgtgctagcatcgtggttcatggtctgtctccacgcaccccaattacgacgaccttcttgatgggatctatgctgctatagagagagttgtagtgagaaaaatttctcgtatcggatgagtcaacaattgaaaattcaggggttgcccttcaatttcaaacaagtctaacgcgggtgataaaagacttggcgcttttaaatccgagtgacgtcatatgtaagcatactagtagggacatgcatgagcttaattcgacccctggcggcttccaacgtggttatttgtggaccatcgagatcatgaattacgtttacctcccgatacggtcccttttgtcatggagtaagggatgaaatctcttcacggatatattcctacataaggccgtgatgacaacccacttcatggtggaacctttatcagtagccaacccgatgtccacaaagcatcacaaatcgagttttgtgagaactttctgaaaccgggccgattatgacggcataggtattcttcacggacataatcctaaggccgtgatgacaatccacttcatgttaagtggaaccttttcttcagtattagtcaacccgatgtccacaaatcatcacaaatcgggttttgcgagaactttctgaaaccgggccgatcatggtggtgtaactataaaggggatttaggctgaaggcctggggaccctggtagaatcattcaattcaatatccattctcgatttcatcaaaatgaccgattacaagtttgaaggctggtgtggcctcggccctgaggctggcaagggcaagatggtctggcaggagttcgagcctaagccctgggaggagacagacgtggacatcaaggtcacacactgtggtatttgcggttcggacctgcacactctccgcagcggatgggtatgttttctttcagttgctctgttgactcggtttctcttttctttgaattacttcgttgtctcagtttctcgggtgaattgaaggctaacgtctcttgtgtatcgtacaggggccgaccaaatatccctgctgtgtgggacacgaggttgttggcacagccgtgcgtgtaggtacgcaggttaagaacggcattaaagtcggggaccgtgtaggtgtgggagctcaaagcggagcttgtgggaataaggacggcgactgtgaagcctgcgcggcttcactcgagcagttctgtaataagatggtcggcacatacaatggagtgtacgcaaatggaggaaagtcttacgggggttatgccacttacaaccgctcgtcctcccacttcgttatcaagatccccgacgctatttcctcagcggacgctgcccccatgttgtgcggtggtatcacgacgtattctcccttgaagcagaacggctgtgggcccgggaagactgttggtgttgtcggtattggtggcctaggtcactttgccattctattcgccaaggcccttggtgctgaccgcgttgttgctatctcccgcaagtcggacaagaaggcggacgccctcaagcttggggctgatgactttatcgctactagtgaggaagaagattgggtcacccgtcacggacagtctctcgacctaatcatctcgactgcctcttcttccaagatgcccattaccggatactgcagcctgctgcgtttccgtggtaccttcattcagcttggcgccccagaggatggtggtcttgaaatccctttctttgctttgatcggcaagggtatcaagcttggtggttcgctcattggtagccctgatgagatccgcgagatgctggaccttgctgctgctaagggtgtcaagccctggatccaggaacgccctatgaaagatgccaaccaggccattgtggacatggacaacggtgatgctcggtaccgttatgttttggtcaacaacctgtgaatcagcttactaggaccgatgtcatggatatgagctgaaatgatgttgtaactagcggtttgacgtttactacataatagaggtatatgagagtttagatcgtgaggcgtatttgggctgctggggtctttgtccctgcaatttaattttctctgattcatggtgatatttgactcgaatgataggaataatccgagttagcaaggcttgaatcacttggacgagttgtcatgacttacctgcttagaagctccgcaacgttgactcaccgaaaagcgcatacaatatcgtcgctaggaaatatgaatttttttttcccctggcctcgatttagtattgtctagactgcggaaagtgaggtcagggtcgggcgaccgccgacgaatcacctctcctgttttccctccagctggttgatccgatgactatatctggacccactctgctgaataaggttggaatcgagtcgagggcttagttacattgatcgaagggcttaagccttacatacagctgatcgaatgttagaatgggaccgctaatttagcgtgaaggaaaatatattaatccgtattaatccgcgtttcgaccatctatctgctcagaggggtcttagtgaatgtcgagatctctctttactctaggatgtcttcatagcttataataggcgttcataaagaccgcgtgatcattatttacagtattatctttaccactaaatcctatcttcttctatactaaggtattataacccctaaaaaatcccgacattcgctgatgtctaacgttcactgagctctcggaactcggattaatacgtgttcctctgttccaaaaggcgctaaaaattagctgtcccatctcaacattcgctcagctgacagatgaagggatgctttgtcagcatatgatggatgacaaagctacccacctgacctcgggcaggacctgcctgcccaggtgccctaccctgtccaggaaggtaaaagcgaggagtcgcatcaaatatatatgttgtagtgtttggcgaaaattgttatgataatatgaacgactaagtggaataagctcgattttagggtgggttttaatgcccggggctacgactaacttgaaacttgctaactaaattgtccgatagaataaccatccattcctattgcgctgaacctttccttaatcttttcaccgaaatgtcaaatcagatatcaaatcagatgtcaaatcaaaagacccttctggaagattttaatatcggaaatttcgataaacaagcgctcaacaaatcagtggaggcaaaaaccggcgggtcagtcgtactcgacgaaaaccaagccactataacggatttgcagagcgtttcctggcctgtcgcttccgctcttctggtcaaagaaaacggatcaggcggtagaattcaaattcatgagcaatcaggagagtgcgtgttggtggtgatgacgggccctcaatttgacgaacacttcgccatcgcttggctaaagaaaggccaaaactttcgtttttacgggaaaccatcagtctggtttttcagaccagccagcttatagcgcacaagctgttcgcagaatttcaaggacacatcgatttgaaagtgacctccacgctaggcccgccataccaaggacaaatcatcttcacagcaggaggaatggctgcttcgcggagaataggagctatggagcgcattccatggtccacagtttggccaagtgtgtttttctcaatagccggttcgcaggaatagaggatctctaggaattcgttccgctcaattgaaacagttgactgaatcggttgatccgaaggtagaccgaagctgtattcttctatatactattagttttagctcatgtttaccacttcttgaactgaccgatagttggactcaattgaacacccttgtgatgcgactcggtaataccttgtaaagctactggtcctccaacgtcaagagcagaagcagaagtgtcttgtttgtaatatctgagtctgaagtgttggcataaagccaacgcaactctgcccggggttctggnnnnnnnnnnnnnnnnnnnnnnnnnnnnnnnnnnnnnnnnnnnnnnnnnnnnnnnnnnnnnnnnnnnnnnnnnnnnnnnnnnnnnnnnnnnnnnnnnnnnnnnnnnnnnnnnagccaacgcaactctgccagggtttctggtttctcttgaccggcccaccattccatggttttaccgatccatttaagttgaaagtcggataatttcgtcttgggaaattcgagcagtgacaatactaaaagatcggacgggaatattttcatcatttctcgaatattgccccgcgatttttcatcccttcgtatagaagtacgagttagcttgtcctctcttcactcgagctacccaacgaccttgtgtgacgacttcccagaagttcgtcagtcattgaatcaccattcttatgaagaagggcacaatccttgccagcagactgcataatttcaacacagcgagaagatagaatatacgaccgagccaacatgatgcttgtgaaatatgtgggtcgcaactcctgtgatgcaagcgtgacattgcatactggttattcaatcaatttgtagacagaaggccgcgggaacccaagaaattggagataatcaataggcttccattgttggcagcagtcggggctatccgtagttttaatatgcaaggacgaccgtaggacgagcgggaacttttttccacctgtcaaggcgacgttctcggggggatggtggaagaaatcaggaacgtgctttagcagacctagaattgcctgcaaatgcatgtctagggacttcgatgttccatcatacctggatgctgcttggctccaggggtgtagactggcttggtgacatgcctggaagtgatcctcaggcggacaaacaccgtcaccagggtaccaattttcaacatcgctggttgaagaatcggatacggagctcgactgctcgtcatagtcttggatgaggtggccgtgttggttctgctggctttcctggctgtgcgattctagtgcttccatttccctttctcgatgagagacttgacgaagagacaaggatcattggggagatttgtagggtgtagaaggggcatagaggcggtgaggtagagactccaggcaggggctgccgctgcctattttcagccccggctcaaaccatcaaatacccattatccaatgtgccactgtaaagtaacggaagtatgtgggttgagattgaaaattttgcctaggagatcagctggctgctatcaacatgttactcataaactattcaaaatgtctttgtaagtaattcacaatttatgtacccaaggaacgctgctagatcccgacaataatatctagcagtttttgaactccgaattcgaaatatctgccacctggtcccttgaaatggatctgacattcacatggtggacatccattggctgttggcagcaataccggctcggagagaagatgacatcgcaacacctgatcgaattgggtaattttactaaattatagggctagtgagaaatgtcactcaaatggcgctatacccgaagcagtttagaggatttaggggcaaacaaattctgcctcaggccataaacctattgcctgaggcagacaggtcttctttgacccgtgagccgttaggtcggtgcaaccttcttgtgtattgacttttgaatgaaccatggaagcatcgaaggggaaaatgacgactgcatagcatttccaacgaagaaaaaaaatggaaaaccggaaaccgagtttatctgcaccgataaactctatgaggtcatctagccgtaggtccaaccaccgggcaaattcaattggttcagtactataatttagattgatatttcatgtctagctaggaatatgctgtgctttatattgccatatcttttgcatagcatatcggtataagatgaaataagaccaaataataccaaatgagatcaaataagggttgcagacaacgtggtccccactggacacggggcacagtggacgatctctatcttaaaagtgaccagatggatccctccaaccctggaagtgacccacaacgctcagactttctttgatgaggattcctattccggttagacaagtatggctgtgtttcccgtcagatagcgagcttgaatctactttctcttgactccctgtcttgcgcttctctcttcttctcctcgttctgatcaatgacccttttgaatatgaatgggtgaacttcctatacccatgcgcccctttcgttagaccataaaccctaatcatcacgacgaggtaccccgccaccggatattaatcctaggggcggtatgatcggatcgagctgccagcttgcgattatcacgaacaaacttcatgcatactcaagcaacgattattgagagaatttccgcgttcaggatgccacatatgatgacaacattcaattcgcgcgcaggccgagtcgcggtgctcgcagtcttctttatcctcgcccttatctggctcttgcccagccatgatgcccccttagtgtcgccaatcttctacgccggggatggatacaatagcagtcaccccatcgatgctctgatcgataccgcaaagaccgatctccacgaactcctcggaacacaagcgcacgaccttcaaactgccgcagaccaatatcgagcgcggcgtgggagacatccgcctcctggttttggagaatggtaccagtttgcaaagtctaaggattcattgattattgaagaattcttcgatcagatctatcacgacctgactccgtactgggctctcgacccgaaggaattgcgtcgacaagctagaagcatcccgacccgtatcactatccgcaacaaaaccgcgatattgaaaaccgatgagccgagaaattggatggactcgtggtatgatctggtcgcgaaattggaggacggactccccgatctcgatatgccaatcaatgtcatggatgaaactcggctcgttgtgccctgggaggaaatcaatgagtacattcagaaggagcaggcaaatcgcgtgatgacgaaaccgagccgtgttatccccgaatacatgtctttgaccgattgggataacgaagacctggaaccttatgatcctggatttgcaattccgggcgagggaggttactgggagatggctcgggttggctgcccacctggaagccctgcacgcaccagcaccctggccaaggttgatttcagtactcctccttgggaatacgacaatttcgagagaatgtcataccacggttatgtatcaaacttcacattgacaaaggacccatgcgtgcgcccagagatgcaggtattgcatggaaccttccttgagcccatctctgtttcaacttcgcacaagctgatgccattgttcggcgggtccaagcttcccatgaacaatgagattcttcttcccccggcgatgtactgggcccagaacgaccattattccggcggggagaaggagcacggtggcccttgggcatcgaaaatgaataaggctatgtggcgaggtgctgctactggcggccgggctcgagagcccaactggacgggcttccagcgacaccgattcatgtcgatgatgaacgcgacatcagtggctcaggccgagaagaaccaaagccacggcatcaacttcagactcccaaactatgccgattacaagttgaagggcgacgggttcatcccgcagcttctctcggagcatactgacacaggcttcaaccacctggtttgcacgccttataatgaatcggacccgacgtgcccgtatcttgatccatatttcgaggtcgcgcctggaatggcaatgaaggatatgtacaacttcaagtatctgcccgatcttgacgggaactccttcagtggacggtaccgcggattcatgttgtccacttccctccctatcaaagctactatctacaaagagtggcacgactcgcgactgattccgtgggtacacttcgtccccatggataccacttaccttgacatttatggaattatggcatatttcctcggcggccgtgacaaggttgcccgtaaaattgcgctcgctgggaaagcttggggcgagaaggtcctgcgccgggaggacatggagatatatacataccgacttctcttggagtatgcgcgcatttgcgatgatcagagggaattcctcggttatgtcggtgatctcaagatgtgattgcttgttcatacgcatacgtacaaatcgactctcgcggtcaactccccaatcctccccagcagagtcggtttatcgggcatgattatcggactttttttcataatcgaaaaagatcgttccgcctgaatccttatgtggcgccctagcctaggcatcccgactcctcgggctttctcggctccatcctcatggcactggccttgatgtctccatcccggcgttattggctttctcagccttcggtctttctctcactcccttcttattctttaatatatactaccttcatgtgatgtttgtttttacttgtcgatgattactgataccatgtcaatattcatttctcggccagtgcctgatgtacatgaaacctgacgacgatgtacataaataggtgatgtttgtcatttatgattttttatttgcttcttacattcctctttgcacacagataattcttacattagaaaagcactatactcgaactataacacgtcttactccttccactcatctctgccgagcctaacaatatcagcctgttccagagtccaatagctcgacggggctttgccctcttcaaccaaacgagcagctgctacagctgctctaccaatagtagtttgatcttgacctgctcgcgccagttagctctgaatcttcgtcaacattcgcgtgatcagcatagccataccaactttgtcttggataccctgaccaagcttctgaaggccttccacaaacttctctagaagaaaagacttcgacttctccctcccaataatcatcccgggtctcagaacgatagcattctcaaagttaaactccatgatggcatcctcgacgccaaccttcattttcgagtatgggacccagccccagagaaggcttcttgtgcctccgctggaaatgaaaacgtacgtcttcacgcccgcctccttagctgctcgagcgttctccacgcataaatcatggtcgatcttccactggttctggatgctgcctgctgttgctttggtagttccgaccgcgttaaagaccactgatggcttgggggacagagaagagatcatgtctccccattttgaggtatcgctttcctcgagtgcttcgagcttatcggcctgcgcattcgggagtcttctggagatggtcttcactttggaaaatgcgtccgatgagagaagggtagccagaatctgagaccctacggctcctgtacagccgaataccgctgccgtcgccatagtgtgaggtttgtgatatggcactatcttgagagagacacgttccaagataagatgatgtggtccgagcgtttgtatgtccccgcctaggccaatctgacagatgacgtcagcatcactatacacaccattgtagacgcatcttactctatcaatctttctataaaggaattaccaaatctattttgcacactaaaggaagtgcggagatgaagatattattattacacgaaagaccacaacacccaataggacacggtctacaacatactcaatcgggcgccctatgcgggattttccgccaaagtcgcgccctgctacatggcttgatttcagactaaccaagtacataaacaccaaaatgaccaggtaggattcacggattatgaatgaacattgatcgtcttggacatctctccagcccaaaatgaacgaccttaatttccgtgtcgcgaccgaagcggacgcgcctcgactccagcagttggtggaatctgcgttccgcgccgaggacagcagaaaaggctggaccgatgatctaggcctctcggcaagctttcgcctggatgtccaagagatcttggccatgatcaccaagccggacagtgtctttttgatggccaccgacgatgaaaatacgctcgtcggctcaatcgggacttccaaacgcgacataaaccacgctcatctttttatgcttgccgtcgatacaagccaacagcgcggtggcgttgggagacaggtcttggcttacgctgaagactattcccagaggacttggggtgttaccacgctgggattaaatgccctttcgaatcgccagcaacttatctcgtggtattcgcgtcgtggatacaaagaaacgggcgagacatcgccctttcctcgtgagaagttcgcgaacttggcgttaccggatgatctttgttttgttgaatttgagaaggttctggaatagcacctaccggacaagcgcacgtcctaaaccggggctagcaagtccggtggatcgaggataggtgggattgaacggctcagagaagatcgagaaatgtgaactaagtgaactttcgaataagattcagaaatgaactttagcagcaaaatggtcataagataaacctaaaattttaggaattcaaaatatccgtccaagtacatacatagccagcgcttcctagattttattcgccgaggctagtacgaacgtagacaagcttgcatattgtgttaccctaggatcctggccttaaatctccttgcctatcttaagcccgaaatgttttctacatgacttcagacaaaaatacattactagactaggcattctacataccaagccctcaactagaattatttgagcttaaacctaactgcaaacaaggctcaaatgggccatcattccttaagtcatgtcatgagaccaagaccttacttacaatctagcatcaattaatcttgtcgaacactgaggtggatacatggcgaaatagaggatgaacccaggccaaaagcctgctcaacgggatgaccaaccccatagaaaggttcatattgttattactcaaagtcgtcagtccgattatttcctagtttgtagagaattgcatatctgctgaattacatcatcttttgcgtactgtatattgctgtcaaatcttaatatgacgaatgatagaagatcactcgcgtgcagtactgtcacactatcaaggcaacaaacaacaagtcatattgtcgttggctatctcctctttgtttttccgctcgactggacagaagatcaatttcaatttttgcgtacgtttaagtgaattcaacgtcatgtagctacatgtactaatgttgtgtaacccaccctgccaaatgccccattagagtctcaagcctacatttgtttataagttggataactgctctgatatcaaaaggcacgaaaagacacaaggacaactcccacattccaatacaagtctacccatttatcaacattatgaatccaacatcccaatcggctgtgtcatcatgtccaaaaatcctaatgctacatggtaacataccgctagtttctacaaaatatcatatagagctttgaagtatgaatctgactcattcacctcttctcataggctacgcccagtccggacatgtgctccaatgcaagaccagattcctgaagcctcaagtaagagatgctgttctcaacgctctgcagcaagatgcaaattcaaagcccgttgacgtggtcgagtttcactatccttcaggcacgtggcctatgaaactcgatcaaccccgggagagcaatgagctgtggacatggggacatggcgaatctatgactggccgtatccggggccttgaacagtctgtcgatgatatcttccgctatcttgagaagaatggcccattcctcggggtcatggggttctcctcgggtgctgcagcgggtgctataattgcttctcttttggagaaaagacactccatcggcaatttccaatttaatgtaagctgggggaaatatagttggcctggaacatgcccaggtggtagcatggctgactttctttcccttagacggaccacccccctttgaagtttgtggttgcggtttgtgggtttgcattgaaagatcctctttacaacgacttttacagtcccaaaattgagacgccgatattccttgctattgctagcctggacgtaatagtcgatgaatctgaatcgctgagactgcgtgattcaagcacaaatacagctttgtgctttttcgagggggcacattatgtcccacgagacaaggtatttttgaaatccttggtccagtttattgaagatgctttgagcatcaaagaggaccacgaggaggattgggaggattgtggagataattgcggattgcagtaggccatgacgtgcaactggacaactattggaaggcaccactcgggctcaaacaggcaggaaggtactgccaaggcaagagccctgaggaaggaacgataaaaaagtgagtatagatggaaagcttaaggcagatattgtaacccccaaccccgcgttgaaaaactgtgagttacgggctgacggcagggagcctaccctaaaaagttggctctctgatgtctcatacactgagcgaggcgcgtcttatgccaatgaggaaactatccctaggctagctgttgtgaagaacctctggggcccttttgttttctttcctccttttccatgcatgttacaagttgatcacgtgatgccaccagcccattgtttttcgggcgaaaaacgtttgtcttgtttgttttgttctgcctactcagctatgtccacaagattgtgttttttggactattgtcattttagagagttagagagattattgagattattctgccacgtatacactcgccttaccaccgtttttccgtcattctttcctcctaagggatcatttgaagctattcacatttgacccaccacaatccccaccataaccccacccccacgatgtcaaataactagacctccagtttactctttctcacgtattgattcctgtatgtggtcgggtatacatacctctctagatgaagttatgccaagcttcggtacaaccgtggatacgcctccccggaaccaactttttagctttgacgaagtctttcacagccttggaattatagaatcaattgatcttatcatatacagatttaattaaagagtgccataactgaatccacttctgggcttgaaatatttcaagggcagttgagtctgctgcatatggtcaactggctacttagttgccttctccaaatccgcagcccagagagctgcgccaacagtattcgtgaatgaaaatgcgatcgaggcaaatggtaccatttccaaaacaaaggccgcaattccaagtctgatgagcagtcagcattcgaatggatggtaggaagaaagatggagtttacgcacccagtgtatgcgccctggtttttcttcacccattcctctcgcattgtagaatcccaacccttgagctgaaaatacctggcatgaagtatcggtcctgctcttttcccttgtatgaagatatacaacactgttccgaccacaggaatgaggttcaggggcaggtagagcaatgatcgcagcagcgcccgggggttcagccgcgcgagaggccgcgtgaaaatcttacccagtctagccatcgcatctctccctcccgaacggggtttcatctggcgtccttgtgctacaagtggctcctggtcacgcgcgactagggtgccatcgaacgtgtcgatcagggcatcttcgatgagaaatgaacgcgagaggacgcttgttatggcggaactttcgccgagaacgagaatcgctgcggaaatagcagcgagcgggccactggtgaaggccatgatggccatctgcggcacgtacgtgaagaagaacatgacggtcgtgacgcctactcccagtgtgatagtccggccagcgcgagatataaaagggcgccagaggtctttgtgggctgcaaagtagacaattccctgagaagatatttattgcaattagagatggtcgggaagcgcccctttaagagctgacaggcatagttacttaccttgaatggatacaagtaggcgccagacgtgatcacgtcatgggcaattgcttgactgctcttgacctcggcaagcactgcatctttgatcttctcggacatctttcctatagaattagtattagtatcggatgagaagaatgagttttgggaatcgtgggagatgacgattagattatcgataagaaaacagccttataatgacgtcattggattgagcttccaaggttgtgcgggacggagtgtactatgacaggtatttataataaatcacatttctacggtgtggcaagcttagttatatatctcagcaagaagtgatctggataggaacatggctgagattagttctcactgaaaggagtccatcctgcagccaccatatcgaccgccctctgagtcgcttcatccaagtcctccttaggtaacctcagtgtatcatttgccaactccattatccctgcaaaatcaccttccttgttggctggcgaaaatacaccaccataaagcatcttagcgaaccccgtgaaaattcccttagacaactcgtcggcgccgtctgcaagacgcttagcgacactctcatgagtaatctcccaatcagagtctgtagtgcccaagacacgatgcagactgtcgagtatatcgcgttgcgacacgcggaagctattgatccggacttccttgttcttgaagtcgacaagcgcaggggttgatcctgactccggtaggctgaggagggcagctagagcgcgaccacattggtcccaagtgctgatactaatgatgcgagtaccctcgtcgaaaaacgtgacctttcggtctttgatcgtgaagccgaaccattgctcgccgcttgccaggctccattcgtaccagaacccgcatgataatgtcactgaggacgagacaccattttgagcatcactgattcgttcaagaacgctctttccatatgcatccccatctttcactccctcagggctaagagggaatccgtacgcatttggcatgatgtaaggaacaccagcctttccggcagctgcggtaatcctagcgtgaagatcctcgggggctcggacgctcagggtaatgacaaggaattgttggccattcaaggcattgacaagcgagtcctcatcgtcgtacttgactcgaacggctcggactccattagggagttttgactggctgtcttcgcgggtgagagctgtgactgtatgctgccctgtttgcagaagcgactgagcaaaggctccgccgatgcggccagtggcctgatgattgtcagcaatttctcctcgaagtgggaccggcaaaatgtagggcataaggcaatagacctactccgacaatggcaactcttgtgatatgtttcttggacatgttgaaagaaattgttagaacaatggtctgaattcttgtctgacaggttgcgtaaacctcgtttatatatatatatatatccatgacctgcacggagttatcggactaaggaaccgccgcctggagatagtcggagaatggacataaggactagtaaagccgagcctgacttggtttgtgctgtccctgatcgtatttcgcttgatatgacgagtgtatacaatgagatccgtaagccaaactacagtccacttactccgtcagcccagcccaaaacctccgaataaaaatagcctgtgtcaaagaaagaatgacaaattgagcttacgcgtaaaaagagtgatatgttgcagcatttatccccagtcaataattaagctgcttcttttatactgccgcaatggccgtgagagttttgcctgatggtaagggcccacactaattgaagaggtaagtctgaatccatgtttaagtcacgttaattcccacttacccatccatagttatcgcaccggcattgctcgtagagagggcaactaaaaacgaaaacatagtcgttagtatcccatagtaagcaatgactgtctctcagaagacacttactgaatcccctccataccgaacaccacatgccacaaagtttcaaacacccacccgacaccgtagtcatcaacaagcggcacactcttttcattcacccagtttagcatacggatataatcacttttgggtcgctgccagatgcgtgctcggctgaccgcaaactgagcacagcagatacccccaatgtgttccggaacttgcgcatcttccccaaatatgtctttatatatagttggaaaatttgcacgcgcatcattcttgtcaatgtctgcttgcgtgggattgttgggattgacatgagtcggacagcctgggttattcgtacagcgcaggttcaaatatcccatcgcatccacggcttcgcggcgcaggctatgcaaaacgctgcttgtgtgggggccaaacagatcgttgtgccactgttcggggttggcatggaggaaaatcgagtactcgggaagctcgtcgtataggtcgacaatgaacgaaagataggccgaggcttcccggccgcgagaagagtgtgcgacgagtagttctgtctcgggctttttgtccatagtgtaaataaacggagtgttatcgatactggccatgggcattcaattagtgtggtcttttataaccttgggacttgtttgcttactgtgtttgaagataatcacgaagccatctcaagtcatctgagcgtgtctttgacattaccaaagcgacctttgtggtggttgcattgtagctttgggttttcttaaccagttcatgtaacgctgcagtcctttctgcctcttctgattgttctactggcatcagcatagagccacaccgaatttcacagtgcagtcgcgtacttgtgtctagggcttcatccacagtttggactgagcgataagcatccaaatcacagaacttcagaatcaggaggactgtgcagccaaatatcatgagtcctgataatatgggctgatgtctgatccatgagattatcgatctcttgagtcgtgctggatatacacgactctcagacctgctgtgactgaaagtgtcgctcttcattctgaatttgatatgccgtcaagaattaaagtgggagaaagagaaattattttggttctgggtgtgcgacctggcttcagaccgtagttttcgcggccgggtttgcaacatgtgtgaggctatgaccccccttacgtgggaaggttgtgctatctcaatccatcgaacttactcaggaggtggacgtaagcaatgcctagatctctctgctttataaaggtagattcccacagagtatgcaaagagtaagatatgacgacacaaactggttgtgatgatgtaggccatgtatgatgtgccatgtatgaacttgatatcttattggtcgcaatcacttcatacatggctcgcccttgcgtggtaggtggtcccttgcctttgctgtcgatatctcttaccgaacaattcatgtacccagcaaaagattttcgacccatttttgtagatgccgtggtccctcttgaaaaagctaggctcggtacatgtatgttgttgaagaggaatggggcggtatgtgcctgatgttggtaaatgtcgaaacattcgtaatcccatcccatctgatgtgaagttcacgcggagtatgtactaaatatcgctgacactcaaggcaactgtcataaaacaacatccaacggatgtctctgggttacaaactaagcaaacacgctgattatgtgcataactttgctgactttttatctttatgaacgccaagacctggcttatgcaaaaactgggtccaaccaaatcgggcttgattttctatctggtactgttactaacttactccaccgtccgctatgaatacttctatatccaagccggccgtatcgcctacaggcccctctggcacttttatggtcgagttgctgatctacaacgggtcgcctttcaaaaatcactgggcgtactttgttcggtcgcacgaagaccctgatatcggcgtgaagatacacgcgaccggcaatgtgagaagtggcttcgagtttgaaattaagcgcagtgaaaacctgcaaatcaccgacgacattccgtcgacaagggtcccgctgcaatgggtggacgcagattactttgatgagaaggcgatgcttaacgatggagaatacaaaatcgacaatgcacctgtctgtctctttgagaagagtgcttacgaggtcaaagctccaggaaagactctgaactcaatcagtgacggggtgagtgcatccccaacccagcgcctagactgcatgagggtgtcttctctttctctttgagcacacacttacgataatccacacattgctctttttctaattcaccaggattggctgatttggatgtcctagcccaaaccaggtaggaaagttattcaaagggattgccagacatggattgtcgagtctgcggatcaacttcaccgtgacaacattttgagcattgaggttgtcacttatcttcacgcaattaaacagtgatgatgggttccaccagtcgttgagccgggtatcttttcaaagacactcgcctcggtacatgcgaccactttcggttaatgtgagcttgctggcccggctgattactagggaggcggaagcttctacaagaagaatcattgctcttttggaaagtaattcattttcagccaaatcattttacactggagacgaagtggctttcttcagtggcttcgagcagttctagctcagtaatatttttgaattcatagccgcccttacgcaaaaaaagaagcttgaaaccgggcagtattcgttccaaggtgctctcatttcgacgtcaggttcatggtaaatggggtatcatacaggagaacatatcacaggatttaatccccaacaaaaagcaaatcatgaccacaaaatattgagtttcgcaagaccgcgctttggcttcggcatcggctccggatttttgtgccagctttcgatgaaaggccgaattggaatttccgccagcgggatgatcttcgtctttgcccagaatttgtaggcaaaatacacaataacgatgaacggcaggttgaaataagtcgaaacaaaggttgcagtattccaatggccccgcataaatgtcgaaaaccctccagtgaagaacaaaataatgtatatgatcaaggagatccatgttatgtatggctgaaaaggtgctgcccacgggagctccttgaagcgatcgattccctgcttcttgcatccgtagtagaatctaagataaacaatgcagatgcacatcaagttcactagagtagagatcgagacaagattctgcagccatgtgaataccgtactggccgaactggaaagactcatatatccgagtgccatgaaaacgccatagagtgagactgcaacccaagggataccaaatcggttgatacgcttgaagacagcaggggcgtggccctgggtcgccatgccgtataggattctggaaccacccaagatattgctgtttccggaggaccatgctgacgtgagaacaactgcgttgataatcgagggaacgaccttgataccagcatggcgagctgcgataacaaaaggggactgcgaggctgtcccggacgagcccagaagattcggatcggcagatgaaacaaccagaccaaccatgaagattgtcaccacgtagaagagcaaaattcggatgaagatacgtctggcggccataggaatagcttgacgaggatttcgcgtctcggctgcagcgagggtgaagttttcgataccagagtaagcgaagagagcgttgtcgaatgttttccagaatcctaaaaatcggccgagggacccacccactcccaggtactggatgaaggggccatagggggctttccagtaggcaaatccgatggacgtcttatccgggcctcctccacaggtaatcacctgtcaagatggattagcactcaaagtaaacacattcccagcctgaagagcgtaatcaccaaagccatgatgttgatgcctatgatgagcataattttgaggatcgaaaagccaaactcgagctctccgtacacgcgaacaaagacaaacgcggtcgaaagcatgagggcaccaagcacagtaatccatattgcgttattgacagtgatccagaactcgataataacagccgcagcgacaatttccgacggaatcgacacagtgtaggagtatacttggttccatccgttggcgaacgcgagcgcggggtcacagaagacctctgcgtatcgaataacaccgccattgagaggtgctagggctcccatttcaccaacgccgaagacgacactcgcaaccgtagcgccaataattgtgtacgccaagaacgcacccagtggtccagcttccacaatggcacggcccgaactgaggaaaatacccgtccccaccgtgccggcgagggcaatcatctgaatgtgtcgctcatgaagaccctgtctgaactggtgaatctccttgagctggcctgcagcattttctatatcgccagtttctttcatttccccgtcttcgtagtgaggaactttcgggttagacgcaattggggtgttaatgccatggtcgtccttcagaacgtggttcgtcttatagtgtgacattggaaaccccgtggcgtgtcacaaaatctttgcagaagagaagacatcagctaatgaatagcaagttaatagcgctcgtacttttgcacataactaattcttgcaattgcgcacattgtggctccgggcatggtcagttgaaaaataacagctacttggaaaaggccaatttccaatacatatcgtgttgttggctaaggaccgaatttcccctttacaacgcggctttcgcgtaaaatgaaaaaagaaagaagtaaaactcttttcagcggggtttgaatagggcatgtatttactccgtgggtactcatctgctgcccagatgtggagcggagtgggtcacgcgacctgcaatcacgtgcttagtctttctcctgaagaattaaagagaacgtgtgtgggttgttagtgtggcagtcaagttaatgggctagacatgtattttatatctcatttcagcggtctagcatggtcatgtcaagcatcagtgatgcaggaacagcacttggaatattgcggttagggcaccggcaacaagttaattaatctagcttttagtattacatacaacatactgtaaccaggcattaactaacctagcattcaagtggcaaggtggacacaagctatacggaatccataatttcaagtaagcccactctcgagcctccaggccaggagcttgggcgatagatgctactttggtgtccccgtttactttctcttcgtcccatcacagatccacagacccttcgtcttccgatgttagctgctgaaagtgtgtttggaagtgacgacgctttagagcgcccggtcgtaatcgattggttgacccttgatgctgtgtatgtgcctgttgccttgcttcggcgcttaagagaaaatcaaaaagctgctttgacgtaataagaacttcacggtcgagatccacatggcctggtgtgagctcatccgtcgcgaagtccctgaggaatagtcgtagcgcagttgccgcggttgggaatccagagtccgtccggaaggcctactcgacggtcaacgtccgatcatcggttgtatgtcttttttgttcttttctttttccgcactagagaggagtgtacctgtgcttctataacggtagccgcacgaaactcctccacgccatctaccgttgtatactccggtcgccacatagtaacagttgctctcttagatcctttataatcaatatcgaaggcaagtaccgcattcacactcccattagtgtttaagatatactcatccgccaagtggggaacctgccggcttttttgtgcatagcacacctccacaattacaccgagatagtgtgcttggcggtgcccaaacgaggcatctggttcccgtcttgaataagtctgttcgccattatgtgtatcttcgggtattaaaattcgagatgtggcaagatactcgacttcctgagcgaaatcggagagaggtccgttgccctgttggtattgcctcaactgtcttgatatttcgtcggctactcttgcgcaaaacgtatcatggagaggacttgacattcggattgtcaagcagcagcgacaggggtcgtaatcgtatctatgattattccacttgagcacatccggcctttggctcttgatgtcaaaaagctagtagtactaaccttactttatcttccacgtagtttcgaagggattcatctgcatccagcgcacgtaaaacttgtgcatagtcgtcaggtcttagtcgacgttgccaccaggatcctagccggtggcctgcacgatggagtcgtaaacaatccatcacgctttgggcgcttctcgacaatggcttctctgctctaggtggcgacataagaggttcaaaaacactccctggtggactgatgtcagctaccatgagagatacagatactagtatcagaatgtagtttgttatgagatgggttagccacgcgtgggtgtcaaaacatgagcgtgtgacctagcaggcggtgtgtttattaaagatggaagtcacatcgtctcccagtacgctgtcaatatcagtaagcagtaaaagggatgtggaacatgttccaatgacttcctgttgagttcatttatttgacatgaattggatatacaaagatttccgagtgcaactactcaatgaaacctgtgtctaataattaaccgaaatatgaccaagtagatcgttcaacctgagtctcctcatttcaaactgatggcatcaagaccatcatattgaatgccaaagccctcgagcagattggtggcagcagtttcacccgacttataggcaccatgcacgcagccattgccaacaatagtacaatgctcaccagcgaactgcaagcgactggatttgtggtttttcaacgcatcaaccagcagctgcggctcatctccaaccttgtcggcggagtaagtcccatacccagccagtgggtcctgggtccaatgtgtagtttcaacattaaccaggctaggcaaagccttgtatggttctgtgcggaatatcttgaaaagcggttcaaaaaatagatatatccccttcggatcttgcatgttctcgatgcgctgcgtcagaggttcggcaatctgtacgcacagctctttgctgcccgtcataatccataaattgattgtcacggtggcgtaatttaggatattatcattctccccgatcgagtttatactggggttggactccatggatgatgatgacccggttgaagtgtccgtttcctctgatggagatgggtagaagacaaactggtcattctcctttgaccagaagacttcggcgaattcgaaaaacaccttgcccaaggcgccgtagctgcacctagacatgccctcttggatgtcacccggtaagggcgggttaaacgagatgaggttgtggtggtagacccccagtgggctagtcatgataactgcatcgccctggatgaacccgacttctccagcagcatccttgtaccggattcgagctggtgccgtcccgtgttcgttccactccacgtcctcgacgcggtggttgagtctaatgatgtttggatcgcttcggagcgtctccgcagtccagttcacgatccgatcatagccacccttcatatatacattgcgttcagtgatgaagtaagaaagatgtttggacgatgcttggtccgtactagtgccgatccacaattctacctcgcggatagcctgcggagcccactcacgctcatcttcggtgatgagctggtgctggagaacgaattctctcgcaaattcctggactggacgatcctcagcctctgggttagtttcgtagaaccactcgcaataatcagcgaactcgtctgcaactttcttagctttgaactgggatccagttcggccgtctctggtgaagtatagaggaacgccatcgtcataataatatgggatagatagctggggaatgagtttcaccaggctgttctgggaagtttcatgcatccaagcggcacctattgactatcagcacagtccccccctgtttcaacctcgatttcgggtttgtgtcattatcttaccaatatctcggacatggtcaccctttcggcttgtcaaaattcttccaccaatgcgatcgcgtgcttctaataccaccacttcgcagccatggcggtgcagaacagccgcggcatgcaggccagaaactccagcgcccaccacaatcaccttcttgcgctccgacctcactgcgtgtgttccctcgaccaactccctcggagtcttatcgagcgcagccaggtcggagcaacaattactcggttttatgggattaatgcccgttatgagagaagaaagatggaaagattgagccatgctgagctgacaagttgacattcgatgaagttattgagtaagtaaggatcatgttgaaacgaagttgaggggcgttgggctgtgctatcgtggtggatagcgaccactggagactgtagtattattggcttttattgcccgcagaaaattggctatctaccagacttcaggttccacggttattatcgcgtgcataaaaatcagtggaataaactcttctggttacatggatggttctaaactgtatacggaaagttttatagtttgtaggtctaatcagacatttatagacatctctaatgacatctgaaagaatattgagcagcactaaaaagatcacgtagtagaatcgtaatgataacgattgttcaagtccgtatcaccaagtatgaaggctgtataagcaagcatttcgtttctatattaatgactgcagttgatctatcgaagcaattgtcttcctagtacccgtcatgtgcaataaacgtcttagctcattggtgtctcattttttgataagatccattcctctcaatttaatattgaatcacccaaagttgaccttgtataatttagatgatattttccctttagctagttcgagggtgaaagaaatccgaaggatcatgcccaagtaagtaccttttgtatgggcacaccatacaaagaatacttaaacttttgcagctgaaaatcatgaacccgccccatccgcaggtgnnnnnnnnnnnnnnnnnnnnnnnnnnnnnnnnnnnnnnnnnnnnnnnnnnnnnnnnnnnnnnnnnnnnnnnnnnnnnnnnnnnnnnnnnnnnnnnnnnnnnnnnnnnnnnnnnnnnnnnnnnnnnnnnnnnnnnnnnnnnnnnnnnnnnnnnnnnnnnnnnnnnnnnnnnnnnnatccgcaggtggggctgggagagacagttcagattctacggagaaggcggagatctgagcggtgacctaaaagcccctggtggtcgctatatacactgaaatgagctatgaggggaaacaaacctgcaggtgccgggtgaattggggcaattgttcttcggtattcatcttcttccaaaaatgattttctcgtgatcttcccaaatctggccggacccgcatcttatccgcatgtacccgcattcgacctgcaaaggagtggcgggaactgcccacgtgagttccaatcagatcggctatgcagatagcgacctcgggaggtaaagtctgtgaatgggttcaaccatttacgttgccgtggagaatgcggcttttccgcacggatcccggattagggttttggagattgggagaagtagggttcgttgaaaattaaactgtcaatacggaagaagagagaaaggtgctccgtaaacaacattccaatgtggagaggggcgcgtgactcaaggctgacttcccaactgccttcctaattagtcacgtaaccccgagcacttgcttacacgaactggccaggtgattctacattattacacaagagtcttacatatcagacctttgagaatcatgatcacttgtactttttaccagcaagttgaacattaacaaaaaaagcttaacaagcgatgcgtaccactccattgaacatgatttgaatgtgagacctgtacggagtactccgtagccgcgatatatatagacccatataaagcagacgtaatatagcaacatatcgtaagcgatattttgaaaaagccatatgtatatcaccgtgctacttatacataaaaccaataggtcagttgccttactattactccaatgttgtcctagggtttcatttagaaaagactagagacaatgaatgatacgttagaaaagcaaattagataccaagtgatctctatacaggaactttagagctcttcttttgtctagaacacgtatataggagaaagttcagaaaataaaaaccaatctaagttgacaagttggcattcaagcttgaagttttgatcacacgaccagaagttgagagatctggggctgcaataagccatttagggtatgaaaatacacggcagctttctaaaatggccttgttatctcctcggtcctaccttccaaagaacataacatatgtatataaaccaaacaacaaaacgaagaggactacatcgaattctatagggccctgaaatgcttggcccatgcttatctcgggcaggagccccacacgcaaatcgaaaattcttgctctcacaattttcccttttctttcttcttcccccatcatagaggctgatacgctctatttttcctctcgataacatgtctccagcatgaatcactcgccaggtcgggttttaatcagattccgattttaaattcagaaatggaagaggacctgcagctcaatggcaccgagcgcatctgcgttggcggggagatcacattaatcccctcgcccaccaactctccaaatgacccactcaattggagcatctggagacggtactggcattcatttctggtccttgtgtttgttgccctgaccgcggcaaccgccaacgatgccggcaacgctgggaacgggatgaacgccgatctaggtatcacgtgggaccagatcaacatcgccgcaggcgtcttgtttgttggcattggatacacaacgttgctcctcggcccagcacctttcctgtatggaagacgtatctcctatctgatttgtctggtgttttccatcattggctccatcgggctagcctgcacacaaaatgtcggggacaacatctggagccaacttttcgtgggcgcctccgaatcctgcgcggaggcccttgcccagctgtctctttcagatctgttcttccagcatcaaagaggcctggtcctgggattgtacgttcttgccacgagtatcggtacattcacgggacccattgtgtccagcttcatcaccgactcttacctggggtggagatgggtgggttggtttgctgccatcatatccgggggcttgatcgttatcttttacttcacattggaggaaacattctttgatcggaacaaccctattcgcgggcatgatgcgccttctgtcaacgctgagtccacgtcgaatgacctccccctggagaaaaaggataaaccaactgccagcgtacaacgggcgccctccgacggcgaacttgacgaagaatgcggccaggagaaaggaaagacgtatttccagcgcattgccctgatcacgccatcgccaaccctggtcgggaccggcttcaagcagtattgccgtcgcctgttgcacacactgcgcgtcttcaccttcccggcagtcctctattcgggtcttcaatggggtgcccaagatgcctggctgaccttctacctcaccgtggaagcggacaattggtacgaggcaccctggaactacagcgacgctgcagtgggcatcatgaacgtgccgaccctgatcgggtcagttctcggctgcatttacggtggatggttctccgacttcttcgtcatgtggatggccaagcgaaacaagggcgtctttgaggctgagcagcgtctctggctcctgttgcctgttgcgtttatcggtcctgctggcctcatgctattcggcatcggttcggataaaggctgggactggcatctgccgtatctgggactaggattcattggtttcggatggggttgtgcaggcgacctgagcatggcgtatctcatggatgcgtacccagatatggtgttggagggcatggtcggtgtctctgtcattaacaacactattggttgtattttcacattcactgcccagaattggttggatgcgcagagtcttgcgcaggttttcattgcgattggcgtcttgagcttctgctttattatgacgactgtcccgatgatctactggggcaagaagtgccggaggattactcggaagcagtacgaggctttcctgctggttcgtgatggaccttcttagttgagggtatatctagctcgccattgtcattcttcgttcattttgtcaatacatcagcatattgtaataatctgtgtgttttgcggacccccacctacgctgacagaatttgccattcctggtacctacactagctggcggttcttgttttacgcttgtgggtctgcagtggcgtttggcagtagcagagtgagggaaaagaacaggagagtccttttcatttaggacatcgttgtcaatcgtatgaggaccaaccatcttggtggccaaatctttgataggccatgtctgccaatcatttgagataaaactcagacatggcgcaatttgggcatttctagttccccacagaggaaaataaccatcaggcactcacaattgtctgaatagtagtatggtgcttcacatcaagtcaatgtgcgtaggccgttcgtcttcgatttggtcgggacgcaatccacatgacgtgtcaacaacatatatccgatttcacgcaataaataatgcagcacagaaagaatatcgactgaaaccccaagatgctagagtcggggaaaatattctcgggcgtacgtagtcctcccgctagctcctaactatctggggccaactacgcaagctgccccgtcatctcccatccaagctttctccggtggatcgccaattaattgcacggccacaacgaatacatgccgatattctacaacatatacatctcatatcgcccgagcctgctccactatggttcctgtgcacggagccaatcgctatcctccgatgtggtggctggatgtatttgcgtcgtggtcgatgcgatgttccaaggttggacctattgacgcacatctaagaataaaaatagcggacccaagttcatatatatcttgctctcgcttgttcctgagactaaatcctaaatcccactgtttataattcctggggattcgtctgttttctcaatccttgtcgatcgttctgtgcattattacttcagtcgttcgctctatcgctctacagacttcaatatgggcttcccgtcttactgcaagtgggctgctctcgccttggctgcgactgcggctgcgcagactactaccagctgcgaccctatgaatagtatggactgtctcatgtacttcgctgcggacccgcgctgacagtttggtttcagagacttgcccagcagacaccggtctgaacaagtaccgtctcaacaccgacttcaccgctggatctctaggtcgctggaacaccaccgccggcaccgtaaccaccaccgacctaggcgccaagttcaccatcaacgaacagggtgacgcgccgacaatcgaaagcgagttctacatcttcttcggccatgtcgacgtcaagatgagaaccgcgaacggcaccggtattgtcagcacctggatcctcgagtccgacgatctcgacgagatcgactgggtgagttcaccggcatcagacgccaccaagcctccaatcccctcaaatagcaaccactaacgcaatacgcaggaacaaatcagtacctgggacactgaagccgaaaccgactacttcggaaaaggcaacacaacctcctacgaccgcggcacaaccgtaacagtctcaaccccagaagaaacattccacacctactcagtcgactggaccgccgagcgcatcgagtggctcctggacggcgtcgtcgtgcgcacactcgagtacgccgatgccgtcgacggcacaaactacccccaaacgcccatgcgcatccgcatcggcatctgggccggcggcgacccagataactccgagggtacgatcgagtgggccggcggcgagactgactacaccgaaggtccgttctcgttctacgttgagtcggtcaatatcatcaactacaccccggcttccgcgtacaggtacaccgataagacgggcgactacaccagcatcaaggcgacgaacgctactatctctaccaacttgggctcgtcgaactccagctccagtgtcgcttccagtaggacttcgtcttcggctaaggctagctcgtcgttgattgcttcttcgtcggcgtcggcttctgcggcggcttcttccatgagttatgtctctgctgccccggcttactatagttctatctttgccatggctgtgggatcgttcgttgctggcttgatgcagttttagatgggtgtgttgaacatttaataggtctcggtggtttggtgatgagacccggtctattgatatacgcattattgttgccttccagtcattccttttgtgaattgtcggccacttatgcggcctggcatgtcttttttcgaagtctttttagatgctttcttgaatattctttagatatcttctcccagaagcataattcgcaatatctacaacatacgcaactaaaagtcatgaaatgtgcaaaatgattttccatatataacatgtgattgctctgactgatattggtacatgctatccttctttccttctgcgttgaatccgtacatacactacatatatatatgaagctacaatggaatcaaactgttttcttctgagttaaggcatatgaaatgaaaagacagagacaagaattagagggggcagagtcggaagacgggatggcgcaggggtagccgcgtcaatgttgacgacacaccgacccagccaaccttagaaatcaattttcccagccttaaatcttttcactagcgcaacaaatgaggcctctactaagaggatgcttcaacgctcgcttatgggcaagaataatcagaatccagccggggataaatcccgccgatcgcattcctggcagagcctcaccgacgacagccttctaattgagaccatcatcaacattggaccaccaccaaagagaaacccggatcctttccagtgcatggagtcccgattatcgaagcagactagccagccgaagaaaaactcaagtatgttcgaagctaggctggggcagttgtccaagtacatggttggcatggaaccttaggtttgtcaagaacaaacaatttcttcttattcaagtagataatagcttataaccacagagacaacaattatgtcgcattgaaaacctatatccacaagttagtatttcaccgtgagcgctgcacacctggacgtgggataataaccgaccagtgtgtacaaccttgcattcggtatgcaggaaatccaagcctggagtaattccttcaggatatatttggccatctcctctgggactctgttctcggcattctttctctgagatcgaagagactgatacacgcgggttcttgaaacagtacgatatatgtctgccagatggaccagcgactgtgaaagaatcaaaggattgccgaatattctctctccctggatgaacacttgacatgtggggagcaatttgctggtaaaatgggggcactcgtttatttccttgccctgtatagatgttgatttcggtaatttattagtatgcgacgacgacagcgagaacgccaagttcaagggtatcgaagactccgagatgacctccccatccgcatgactgaaccatttgtctctagctatcctttcgaaggagggaccgctgcggctttgtggtttcggtgaggctaggatcgggcctgggccgtatgattatcttgccatgccatgcctatgccatattgcacgccggagatgatgctcgaggtgccgtgagctatccggtcgatattggtgtgttgggcttgcagtgcgtttggcccgtattccgcttctcgtggcttcttcttaacacaagtcctgattgtttcaatataggcatgtgatctccttggtctgaagaggcttttcggtgctaatcacactgccgaagatttgtatgaagcagcccatcttgcagggtcgattgttgtgctgggtctgccgcctgctgcatttctggcgcttagtcctgaggtggtggctcacttctaggatgaagatggtacgtgtgagattgcttgatagatttggtatctgacaagacttgttgctgatttgattatctaggaaaatggtagaacattgtctccccattcctgggatgggctcgcttgaatcgttgggcggtcagatggaactatctatttgcctctttcctttgttctttccttcccaaggttctttcctttttggggttgtttaccactttggctaagcgagacgttcgacttttgcagtgtttgcagtagggccaggtatatgaacaggctgattcccacttctgcacttactttttgtctctctcttcatcctttttaatcaactcaaccacatcgcagcgcaatccatccaacatgcctgccacctgtcgtgtccatcatccatcacatgacttgtctgctcttactatatcttttttccataacttacatttatccttcggacatcctatccacatcacaagcatccattcatggcacctgtcattttcatcatccatcaaataactcagccacgtcagaagcatccttcaacttgcctggcatctatcgtacccatcatccatcagtgacttgtatgttcttgctgtctcttttcttcatatacttacattcattcttcaggtaaccaccatatcacaagcatccattcatggcatctgtcatgttcatcattcttcagacaacccaactacattctctttccaccttctactttatgaggtttgtttcttgtctatattgtcacctattcttcatcttcgctcgtcgtattacccagtgacatggggctgactgtactagacatgcgctcaactacatccagccttaccgtgataggttccggcttcaagacaatcggcatgcttataacaacagcaaacacaaaagcaaaaacacacaaaagcaaaaacaaaaaaaacaaaaaaaaaacaaaaaaagaaaacacctcgaacgatttcaatcaaccactcccagtatcacttcaaacaacattcaaacaatcatccacttcaagcatcaatcaaccacattcaaacagccacttccagtatcacttcaaataacattcaaacaatcatccacttcaagcatcaatcaaccacattcaaacagccacttccagtatcaacttcatacaatcatacctttcaagcatcaacttcaatcaaccttcaaccaaccatccactgcaatccactatcgacattcgactactacaatgcttcgaccttaaaagaggaggaatgaaaagaaacggtcttgaacgaagaagtctccgcaggagtgtctctgaaggagacttctcgtcgggaagaggttacagcgtgtacccatttaaaggagactctcaagaccgtttgctgtggtggtgtaaaaaaaaagctcgcctcgacaagcatctatatacaagctctatctcaatcatccacttcaatcatccaccaatcaactacttccacccgcatttgtgaaggtcatgcgcaggacttttgacatggatgccaatcggagagtgactgctaaagatcttctggagaatccttgattgaaagactgatgtcctatgtataatattgagactgcttgatagaaacatctctgttcaaaacatgtctaccagtgcttttgatatattatcattgaattaggattcaaagtgggcagagtacgtagcgaattaagaccaagacaacattcacccacggtttctatgccattgtccgtcgaattacagcaaaaaagaagattcttccaaataccacaaattatcaaagacaaaaaaaaagtagtgcatcatccgtgaatcgaacacgggcctcgtcgatggcaacgacgaattctaccactagaccaatgatgctagttcatgtgtggggactcggaagttgactatatgagggaaatgcttcttttgtgcgatgtcggactccacccatgttgctgagggcgttgatctcaattgggacataatgtaatagggtgatactaagatgaatgctagaagttgcttgtcttgtatatttcatatccaatgaattattcttagtggttatgttggttacattattactgctgagacatattatatcctacattgtatatctcagagatggatttcaagtatatgacaatgacaatattcacgtctgcaagacaataaatagttatgcacacaaaaaggtagctggtcattaagacattaatatatgaacagacacttcaatgtgcaaaaaggcagactccaagcatagaaggtaaaaagatgaagaagatgcaacaaaaatgcaacggagatgcaagaaatggtatatagagaaatcattgttcatcagtgttccgggtaagagggttgacgatactaggtaacgctggaggaaaaggatattgatcgtcgaagtggtccagctcacttccgtcgccactgtacccaatgctatcgcggttgtcatcaatgatgcgtccgtactcaaggagaaggagatagagatagatgtcaagatccgcgttgcgcagcgcgtgctgcgcccattcctgactttgagatgcgattacctcggcctcaaagtcatgcttctggatgtacggttcgccaactgagaatgcatcgacgggggatacttctgggtcgagaccgaggaagtaggtcattaatccgtacaggtcatcgtagcgattgtccatggggacgaagtgacgccaggggaagagtcgggagtcatgccattctcggaaaatagttgctttgatgcccagcgacttgctgagctgaaatgcgcgccagcgaccggaaaagctgtggccgtcaatgtcgacgaggtattttgccttgaactgctcgctgaagtccttgggctttttgtaggtccaaacatcgtcgtagaaggagcagttcgggatgcagccccaagcctcagtgaagccgacatcgaagtggtccagtgaaaatttgcttggggagaagttgggataggtatgataccggcccgggctggtctcagagaggatggagaccgtctctgacctcatatcagtactgttggtaatgtgcacaaagcgttggcgatgcatatgctgccaattatccgcaagttgaacacccccggaggtgacgccgcgccagaggagagtgtccgctttgtctttccacttgtaatcgtgtcgcgaattgtacacgtaccgcttgtcgttcatgaaatacatattcgcgggaaaaaggatgtcgttgttcacgctaaccttgcactcgctgaagaccgggatcagtttccttgtgatgatattgctggatgctgagaacaaaaacccgtggttctccccgagaacggaaccgacagtgcatagatcagaggatgcagtaaagttggtgataaacccacccaagggcgatttgtatagcttatcggcatcctccacagtgagattggcattccgagcaggggagtcagggtcacaggactctttggcgaagtccatataaagctttccagcgatggagaaccaagacgggtcaacacgatcctcgatggtggaatctttattatacaggtgtttcatgcctggagtgaattgatcctgcgcatcgctgggtaagtttctggtgagggcctcggtacggaggtattcctgggtatcctcgaatgtaaccatgactcgcggttgatccaaaatattaagcgcaatatccatgtccggcagataccgagcaatgcgtttaatcgactttctcagtgtttcaactctccacccttcaatgggggagtaaacaaccttcttattgcgaatctgcacacctgcaatcccgtcgctgaattgtagcttggctgccatctgtcgaatttccgctggaggtaccgcccaaaaaggtcgcagatcgcccgtaatctgttcgaagtcgtccacgttatgcgaattctttttgcgtgcgaacatgtaccattccttgaaaccgggaggtgggtgtcgtccatatgtctcgcggtatttggcgacggttcggcggaaacttgtcgagcgaccatggtcatattccagccatttccggtccgcttctttcatcaggtcggcaatagggtgttcatcgtgcgcatactctccgaacacggggttcgttgttgcggtgaagagccccagattagggaggcggattacggagctgtcgaccgcatgggtgaggaacagaaggttgatgaagcatatggaggttgctgcgcaggccagtagcaagtagaatgccctgcggttccgagggaacgggcggagcattgagaattggttcccaaggtcgggagctacccaggtaggttctagccgcacaccaaatctcgacaatcttacagggattattgaaaagaaatcatgaaggctatgaaaagggggtgaagaaggacataattgtagcaaacatctaggagttgagcagaggaaaggaaaaaaaaagagagccgcctaaggccccttagcctcccacgtctgtcttagggcgccaagggttttacaggcatcatactaataaagttcttggctggtctttccaaggtttgatttaaattacatttggtgtttcacctaagcgaactataagcgacctataagcagcctatcagaacaacatgataatatctatcggcaaccttgtgtagaatatgtagatcaccttgctggaacgtggccgagcaatccgtggacgtgcccgatcaggaacccctcggcggggatgaccgagcagaggccgagtccaatttgactcggatacggtcggctcttggtatatgtgaatattggaggatactcatatatcgcatattttagaactgatatattcacaatcaatcaatgttttaaagatcatttcacgactgatcaaacatgcaaattagactaataaacattagggttattgcccacgggttcttcatggcccggcggtgagacattcctgactcggctcttacataagccagatccttcgaaggcctcaggcacaaacccgcagctcagagctgtcaatgcgactcccacatcttcattacttctttcgacgcgcataatctcttccatgcagatgacgtgaccaattactcctcatgggtgactgtcccattcgaaaatcatggctctaaaacgtactcgcgccgcgctcgaggccgatcttcaagcagagcaatcaccatacgccttctatggaactccgttaccaccactcgacgagggagttcgcgatgatgggtcctttgtgccaatatggaagcaggaactgcgggacgaaaacgggagcaagcgtcttcatggcgctttcaccggtggattcagcgcggggtgaatagccgcctctaaacaaacgacccttggaaggacaaccactgacgtctgttagatacttcaactccgtcggctcaaaagaaggatggactcctgcgacctttgtctcatcgcgccagaaccgtgcccagaaggccgaacagaaacgacccgaagatttcatggacgcggatgacctgcgagaacaggaagaatccagacaactacagacctccgatgaattcgccggctttggtacaacggagctagatgctacacgcagagcgggactcatggatatattgaaaaccagcggagaaactatgggagtgaagctcttgaaaaagatgggttggcgcgaaggtcaaggtatcggacctaaggtgcggcgcaaggccaatctggacgaaagctctgctccgggtggtgatgcggaggaaacatacctttttgctcctgagaacccacccatggttgccttcattcgcaagaccgaccgcaaaggtcttgggtttgaaggcgaatcgcgcctagagtctcacaatgctttgccatccataccagatgctgaggaatccgattcgttctttggggggcgattggctatccaagggaaagctcagcccccaaagccgaaggaatcacggcggggaggacttggagttggccctctcaatgacaccgggtcggacgacgaagatccttattctctgggtccacagatctcatataacaagactattggaggggataagaaaaagaagaaaaaggccaaaccagaaccaacaatcgcgtcatccaacccactcctaaattcaaagcccgtgttcatatcgaagaaggtggcagcatcacgcggaattggcggtttcagaaagtgccgcgacgggcgcctaccgctggatggattcattcttgccgatggcatctcgggaatgtcgatttcagagaagaaatacgatcctcctgtgatacccgagggctggaaaccagccaaggagatatggtcagaaaaacgagataaatcaaagtatgtctctacagctgacgccgcaaaagcttcgtcgcttaatcccacgtccagagcagcacttctgggcgaggatcaactgcctgggaagtctatatttgattatatgacccccgaagcacgggagaagattgccaaacttaccggcaacgccaatttacctccagctttaggagaaaaggcacccaaaggatacgaactccccgaatcaaagaagcgcaaggatctttgggacctcgtaccaaaactcgacaaacagactgccgcccaggccctagctcgggccggtggtgggtggctgccttaccaagaagatgagaaaaagcgtgcacgctaccaaatatttctcgaagttagtgccgggactcgctctaccctcccagaacgggcggaaggatctagcaccgatgactgggttatagagatgcaagaattttgccgagctgcagaagtcttcaaacccatatctggggttatggcatcacgatttacctcctcgtccaccgcgcccaaggttgtctcggatgctcccgactctacagaatctggactcagtagacccgctgaaaagccggacgatcctgcagtagcagctgccaaagttggcatgttcggcccaatgacccgaagcacaatccccttttacccatctcgtcttctatgcaagcgatttaacgtcaaaccaccggagaatgtgcaacttgaccctgaacggcctggagcctccagttccggacctggcacgcgctcccagtccgctggtttccaagccgaaactggcccaaaacaattggtatcgcaggatattatgaaccaactcctcatagactcgttgggttaccttccaacagcagatggtcttgatccatctggtcagcctgttagcgcggcgccaccaccggtagttattgaacctgagcgcaatgatgccctggaggcagagcggcccggcgatgctgtctttaaagctatctttgggagtgatgacgaagatgactagaattggttctatttgtaaatgcaatgagaattcatgtattttgttttcagttaaagtcctataccttgtacgaattaagcaattgtgctctgtaaatcattcaatgttgtggtggtgtgactattggagtcgtccccgcggcattaaatgcgcgaatgggcgaaattgtggaatgtagccttgtttctctttgtttctgtttcattttctgtttcatttctatttcttttcctttaacggttgcctccttttccttgacgcctttgcctcgtctccagggctccaacctagtcggtctgtgctcagcctttagatctagttcgccttagagcgttgaccactactccacgccaacccctctccaactatttcccctcctcatatggagctccttgagtacgagtaagatggtaagaatccaaccccgaccatgaaccccagaaattatacctatgcctatattatcatcaataagactggcttggcgtcgaacgtcacacgaccgaaagccccggccgtcatctccataccatgccaacccgcaatggccccataaccataactaacaaaccccacagggctgctgcgcgtcagtactgtcgcataatgtcgacaaccaaacctcccacacccaagaacgcatctcacatacaacagccacgagggataccagtgaccgcaccacgcaaccaaggcaacgcacgcggcacaccgccagcctccctctaaacgagcactataatgagccagtgcgtaaccatgtgtggtacagtaagcgacggacatggacgcgtgcgcagctggaccgcgagcgcaccgagttcttcgagacgcgcgttaccggcaggccggagatatgggccgctgtttccacggtgatatcgctgattcgcaacggtgacttggctactgcgcagggtattttagatgcggcgggcattactgttcccaccggggatctttgtgagggctgctacgatgagcaaggcgtgctttacagggttccacaatgtgttgttagtgatccggagaacatcgttccttcgtcttcgaggacggctagtgaggatggcggccctgctaggtatgaggaggagcaggatgttgggatgctctcagatagtaagctcgctgatgatgatgatgcggatgcttccggggacgagttaatttcgcaagatgttgaacgccgccgtgaggagaaggggaagacgagtgaacgggatttgatccgtgtgcttgctcgattgagtgatcgtggaggtccggatatactgctttccattggtaagggtcagactgtgggatttttggcgaggagagtgcatcaggaagccaaggttggtttttgttactgatctgttcatttcgttctctggattattgctaatttgttctttagctcgaggatgataggcgcgttcgaatcgcttacctaggtcacttgctgaatgagcgtgaaccgctcgttgaccaagggtggaagactggccatgttgtcaatgctctcatttcccctgttaatgatctaaaccttggacaccgatcttaagagacccttttgacgcatcgtcgatgacccaccactaccgccaacatcactctttttctcgtcctctctatttgaacctccagcgttctggcgtttctgtcatcggatctcttttcgcataataccccaatcttttttttacgttttgccatctacaacctggcatactctcattaccttagcatgatatctcatgtggtgatacccatactcgagtgaaagcagactggctctcaagatatcatcgcccccagctgtcgaattttgcgccccttaattacttgatctaacatctaatgtctccacactttccaagatttttgtgtcatattctcatgtaagtttggttacctatgtacatagagatccacaccaacgatgagcccgcatttcaacctagctcttccatatttgacctatcaccgcaagttctcagagttgttttagcgactccacgcgatcgacacatgcagggcatcacgtgccatgacgtacgtggagtacatgtctatcataactcctttggcgtacacctggtagctctttcaccccgcgtgttaatatcccacattttgttaggctttgggctttggggtaatgttcaacccatacagccaaaccatggactacgaggcagaccgtcagaaacgggaggtatatcgatatttccaaccggaaaatccagcggcgcttaatgcatcacttttccaatttgatgagcatctggctgcaataggagatttttcaagagtcacaaccccttttgtacccgatgcctctgcctcagagagaagttttgtcgaaggcagctctccgtcaagcccaaatacaactttgacttcttttgcacaactggccgctctacgcctgaacgcgcagcgtgcttttattacgtacattactctcctgctctagcgtggattctgatctgaccctttgcaaagtgtattgaacagcgactctcagtttatattggctgaagccacaagaaacaccaatcttaaaagctcaaggtcatccgttggggaaggggataggctcttcgctgggacatcgacattgtcagattattggaacatatgccaggtaggtcgatatctgaaatactgcgatattttacatactgacgtctactccttcaaataggagaccgttgcgattgactcagacaacaaagatggatcgtattcatttttaatcgtcaacgatcttcagcgggaagaacgattcagaggattgccttttgtgacacaagagccacactctcggttttatgccggaactcccctaactagtgatagcggtatcaacctgggctgtctgtttgtgctggattctgaaccccgtcaagggctatccgatatcgagaaggatacattaggaaaagtggcggagttggtaatggactatttattagttagtcgtcaagccgcagaagggcgacgggcctcacggctatcgcgtggtctccatcttttcgtcgatggcaactccagttttgccagcaacgctcacatgtcgtctcgatcaaacagctcagcacatagttcgtctccgcaggcatcacctcacctcagaacccgccaacctataagcccccaaaatgatgaattggaattttgctcagcacagtctggaccaggaaatgcgtctcgaaacggcgatgcacatcctatgagctcggattctaaccataatgaaatgtgtgctccccccagtccaacggaatcgttgcacagctcgcaacaggacgacagtagttcagaggattcctcgagcagcaaccactggcttttccaacgtgctgcgaacctcttgcgacaaagtctggacttggacggtgctggcggtgtcatgttcttggaggctagtgacaactcctctgaatatgtcgcagctggtcatagtgactctgctggatccacagatcctgctcctattcttgcgctgtccaccagaggtgatccgttttcataccaagcaagctctacgctgtcggatccagctgtcaatcttgacaacagattccttaaacagttgacgcgtcgctatcctaaaggaaaactctggtcatttcaccgcgatgggacgttctcaacgtcggaagatcagtcaacagacgattccagaaagcaaaggaagaagaccaaggcttcagagaccagcaaacttaatgagttcttccctgctgcatctcaaattatgtttgtcccactgtggaatgccacagattcccagtggttcgctgggtgcttttgttggactccccggccaacgcgggttttcagtcctgctgttgatttgagttcagtgtttgccttcggctcttctattatgaccgaatacagccgtgttgaatcggtcatcgcggaccgccaaaaaggggattttataagcagcatatcccacgaattgcgcagcccgttgcatggtgttttagctgcagctgagtttttcgggagtactaccttggaccagttccaagaaaccctccttgatacgataaatgcatgtggtcgaactctcttggatacaatgaaccaagttttagacttcagcaaaatcatgtcattagaaagacacaaaaaaaccttcaggcgtggaaaagatccatggaaaccaaaatcatctgaagacactgtgccgcgcctagatacattggttttgacagatgtggctctcttgacggaagatgtcatagacagcgtgtgcttgggtcattcccatatacagaagtcagccatatccaccaatcgtgccacagatatcttgtcaacactgccttccaaatcaacatcaaataccaacaaagttggtcatatctcaggagtagacgtcgttgttgacattcctgataatgactggatgtacaaagtccagccgggatcgctgagacgcttaattatgaatatccttggcaatgcactaaagtataccgaaaagggtcggatctctgtttgcatcgaggccactgagcgctcaaaaggtcgctctcgacgccaaggtctcgaagatatggtgacattgactgtctcagacacgggtaagggaatctcgaagcaatatcttcagaagaacttatttattccattctcacaagaggatccgctgtcagtaggcactggtctcggcctatcaattgttcgcggcattgtgaagactcttaacggaaaaataaatattcggagccgacagggcgaaggcactattgtcaaagtgtcgcttcctcttgaacgtctagtgggggaggaaagcccacaatcaacgtcagaaagagaaaattcggaccaaaatatactcacggcatcttctcaaccccgacgtgccagctgtaatgggaaacgagctgctatctggggaatcgacctgtctcatcttggcgagaatcagttctgggcttccatggctcggtatatcacggattggtatggtctaaggcttgttcctctgtctaccaatgagcctatagatattctgtttgcggatgaaagggatttgtctacaaaagaaatacacaatttcccaccagaattgccaagtctactcgtcttttgcagtgagactagcgattatggtgagtctagggcacaatggtcgcatcttgctggcactctggcaatcctacatcggccttgcggtccacggaaactttcccgtggtatcttgagctgtcttaatacaaatccgacagcccctacgttgaaaccgcagaatcccaggcaaggcttagtatttccagagcgacccaatcctacaggctcggctttgccaattagacagtccaatccctcattaccacgaaatctacgatcaccagatgctgaaccaccaattcccatggcggcatcgggcaattgcatcattggtcttacagggcgtagcgcttttgtatcgacatcgcgtaccgacagctctggccgcacaacatccgggagtactgattccaccaatcctgggtctttatctactcggtcttcatctgatggctctgatcatgtcactcccttgattgggagccaaagcaggcctcgggtcttggtagtagatgacaacaacatcaaccttcatcttatgatgactctcatgaacaaacgaaaagtcatggtcctagataaagccgaaaatggcagagcggccgtggatgcagtcgaaaggatgttgcagggatatgaccttattttcatggacatgtctatgccagttatgaacggatttgaggcaacgcgcgccattcgtgcaattgagaaagaacggagtgactgtatgccagccacaataatcgctttgaccggactcagcagtacacgcgatgagttcagggccctggactcaggagttgatcttttccttgtgaagcctgtttcttttagggagttatccaggcttattgatgaatgggaggccaaactgccgaaataaaatatggcgatctctatcttacttgatgcaggcttgccacccagacgtggaaggtcactttgagaattatcgtttcttacattggcgtttttggtttctttcttcatacccttgctgctatttgggctgcacatatcatggatgatgattgatgaatgatggcagtattcgatttcattatctaatttctgtctatttcgtcccatacagcttcaggggtaattatatctacagacaacacttaatggcggtaaattggacgccgaaaatgacactattgatgccattttcagcatcccttttactagaacagttgatcatcaagatcctgttattcggactggcttataccagcttatagggtgctggacactgggcgactaggacggataggcagttctagagagattaaaagcatagtcttggtaagtgagtggcccatctcttaaccttggaagtatgaacgcgaaagcagatgcagatcactgagcccttaatcgacggcttgaatatgctcaagcctctcaagtaagatttgatttgattgatgtactgcttgactgcttttaaatatgtagcctatgcatgatcaaggaaggactatgtactttccgtgacttttctctttcgtctttcggcggatcggcggatgatgtgaagccttatatctcaggcaagaaattccattacctaatcaccgatctggagcttctagacaaacagtgcaaacaactctatcgcaaagaaaaaaaaaataatttatcgcaatctcaagacagcgcagttcgttaatctcgaacttttgattgaactcaactcaattgcataccttttcaagggtagcctctgtataccttctctaagatcaaacgcccacctccaccttgatatccaggcttctcaatcgctagtcttgtcaatcctcgagataaaccgtaccaatggacggccaaaaaactccttttgtgagggagctcggctcgagtggtatgcatattccttttcttaatgcaaaactataacgctaacctatatctttagaccggaaagtccgcgacaaggctcttgagtctttaaccaaattcgtgcagtctcgcaccgatctgaccctcgttgatctcctcaaactgtggaagggcctgttctactgtatgcaccaccgctatattcgcgcggcataaaccgcagcaaaactaaccttctcccaggcttctaccactccgaccgacccctcacacaacaagccctcgcccgcgcactctcctactctctcgtcccctccctcccccacgcaactctccaccgcttcctgcgcgccttctggatcaccatcggccgggactaccactcactagaccgcatccggctggacaagtacctgatgctgatccgtttctacgtgggcgtggcattcgaggttctcgtgaagaacaagagctcaacaaagaacgcggacgggaaaaagcgcaagcgcgaagacgcagccaagcagggtcgcggcaagaagcagaagaagcaggccgaggctgaggcagagaccgccgaagacgaggaagagaaggacagtgccgaagacctcgaggctaaattccccgatctcgcggcttatatctccattatcgaggagggtcctttgtgcccgttgaactatgatgaggatcaggccccggatgagggagacccgaattacgtgcctatgccgcatggtcctgacggcctgcgctaccatcttattgacatctgggtcgatgagttggagaaggttcttgagtttgaggaggtggctggtgaggacgaggaggagactccgaagcggaagatcaagggcgatgtgcctattgagcttattttgaggccgttggagaagctgcgcgctgaaagtgcctacaagcctgttcggacgagggccgctgaggccttggaggatgagcggttgatcgagtggggtgttcggacaagaaaggccgacgaggaagatgacagtgaggaggaatggggtggcttcgaataaaaattttagttatagtaactgagggtttgtataaacagactgaattcattgcacagcgtgctagcgatatgtccatcaatggcatcacggtttgtattacaaagaagctggtgctagtcttacaggtgtaatggactacaaaatgtattcacatggcacctgtttcatttttttactgtacggcctgaccacagagtatcaaatgtctgatgtgacctattgacaaagcaccaattcccagggtatcatgagtggatgcaaagacccggcaagcaatggatatatagaagactcccaaggatgatagaacggacagcgactttcgtcccagaggcggaccgaaggcacgaattagcgaggacctgccgcctcataaagacggcctgatttggtgagtatcgtacccagtccctggtggacctcggcttggaacgcctcgaaaggcacccgttcaccatcaatactgatgtagccctccttcttgtggggagttagacggaacgcagacgctttgcggatattcagatctggcatgtcgaagaaacgaccactggggatttcgttcatcatactaatcgatgtaccaatgctgactgttccgtcaatagtgatcacgtctatcaggccgtcgtccggcaatgttgcagggaacatatttgtgtctttcgacatgatagccatatttcccgcatagaaattgcccatggtttctcccggaattacctcccacccctggggtagttcgtccgtcactgtaccgtacttgagctctggtagacctggggactctgcagcaatctcgaaacgtttggtgtcagcacccggctccagtggacgtgtagaccacatagcgtagtgttccttaatagcctccttgtcgccaatttccaccttgatggctatatcacaaggccatatggtctgccgcatcaaacggactaggaaaccgtatgtaaaccgctgagcgcccatccaacggatattctcagtactcaaatcacactcggcgacaataccaaaagattgcgagaggaaagagagtgtgcgcgaatttttctgagagatcgagacgagatccagcggggttctcagccccttgacgattgccagcgccgcaatagagacgctaccagtcccgaaggcattccaagtcaacccatttccagagccacatgggagaagtgcaacggcggtttgcgctagcgcttttcgagcatctggccgcttacccaacccattgaacacctcgtagggcaagccgtcgccagagcagcaaacgaccgcatcgtacgcgtcgatatcgagattttccgcaatttcaattgcatgacccctatgttccgtgttctgtacacccacctggcacttcgccgcggcgaaaaccggtgccgcatatcgctgatacaaactggcagctgtgcccttcccaccaaaaggattgaccaatacctttagccgtttgccacgcagtgccttgccatacgccatatcaagtagttgctgtacccatatctcgacaacccttttttcattttcggatatcgggtattggacggtcgttacggaaacatggtccttggcagcagggtgtgcgtaggcgatgacgagattagaagcggtgacttcggcgctgaggatattgtacaacgggatgtcatggttggtttctggatctaagatgcacgtacaccccggtcagaccatttccatcgacagtagcgcccgcgataacgcggtgatcgccaaaggggccggtatcaacttactagactggagtaatccgcagcagcgacggtctttgcgaggcgagcggtcatctgcataggtaagcatattcccacacactgagtgtggagtaagtagtccatacctaatatgaggagcgagttggcggcgatggtcaaagagacagattggtcgaccgtcagggttgtgccatgcagctcctgcgaggagccgtctgtggaggacattttggataagaatgaagattcaggacattatagataaagaggaacagaggaatagaggaatataagaataaaatactctaggggaagaaaggtaatgatagacaatgaaaatgcccgtatgcagccgcggagttccggtgggcccggggcatgtggtccctgcatttgaaatatgtacgaaggatgaagtatagagtaagacatttttatgtgcataaatagatagatctctctttagaggctactataatgccctgggaatatcaaaagacattgttctctatccactacgccggacgagatattcatctcatctacacaataaagagacatataagtaaaaacaaattcgtctcgaatgaacaacacagacagaagggagggggaaaaggataaaaagcatcatatagaccgcaaaccgctggaaaaaacattgacttatgcagtcgctgccttgagacccttcagagagcccaagctcagtgccaggccttgggagcgacttcttatccgcacaaatcctgtaattggcccatcgtctccctccttttcgatgctcaagtttgctagtgcatcctcgcctagtcatagtcagttagtatgtcaaatagaaaggggtagattattgcaaacataccgaacacgctgcgggcatataggttcgcactcaggaagcggcaatctcccttcagcgaagcatcgggcgtcaagcaggccatattagtgctttccatcagctgcttgaggaattcacggagagtcttggccttcgaattgatgttaaccttgttctcccattcgaactcagtccacatggtacggaactgagtctcggtgcagtgagcaggctggatgtagtccatgatgtcggcatggatgtcgttgaggatgaccacatgggtctcggtggagctggcgccgtcatagacaatgttaccaaagataacaccagtgtctgttgatgaaaccttgaccgtagcctggacgttcaagaaatcgcgtgggcctaggttgttggtagatggccgctcaacgaccttgaggtcaccgagagttgcaaactccacgcacaggttttgcagagtttcggttgtttggttaaccaacaggacgtcgagaacaatgtcgaactggtgaacggtcacataggcttcggcatagactgaatcggagaaaccagtcaattgcaccacccggctgagcttcgaagatacgtcttccacggtcgaatcgccaccagttgccttggcaagatccatttcaatctcctccccgccctcgacggcgttcttcttggtaaattggcgaatggggatggcatcgtcaatctgcacggcactcttggctttctccaccgcctctttggcagccctcttcttatcctcgacctggaccatggcgcggaacgcctttcgggtgtcctctaagaaagtaacttcgagctccttcttctcggagaactcggccagggatcgcacacaagtcaagatacgatccacagaatcctcatcaataggagccttaacgaagtgagattggccaacgcgcatgatggaaatcataataagcatggcttcggcacggagagcgttggtacgagcagtatcttgcgacacctcggaatggcgcatcaccaacttggtcaatgtcgaagagagcaccgttgccaggtagtagtcaccgtccaagataagctgacgcagaggaggcttctgcgcggccttgacagcctcaagacgagctgctgctgccgattggctggtgagagcactttcggtggcataggtgccatctgcaagcacctttcgggatccagtaggtgcggccttggaatggccattggcctgctccatcagcagggcgttgtcatccggaacctcatccaggagtcgttgttcggatgccaaaattgggatttcaccaaggctggctctgatcgtcctccaagcatcccgaatatccttctcctccagggagtattcaccaacaacccagagaactccgcggtaaacctttccagctcgaacctcactcaaagttgaaaccaagcgggcaacgattgacccacgcaagtctgggaatttctccacgacctctttaacgaacgagatcacatcgacagcggagttattattgaagtcggcaataaagtccatcagaagatcaaccacgctagcagcaatttcagagaacttgatagcgcaggagtgtattgactgtaccaatatttggcgatactcgctattctgtggatgtcgttagtaatgctgcgttgcgcaaagtgagcgtacaacctacctgttcatattgttcgtcgacggtcttggcaagttctttcttgagcagcatgatgatttcttccacattcttgctcgagaccatctccatagcaaggttgagggcctttctccggacatcaatatcagggctgctgagaacccgcagggcctccatagtcaagtcgtccaagacaccctcattgcgaattctgagctggtccacgcgttccaaacaaatgagcttgacgttgttgtcggcctcccgaatggcgagctcgatcagcttgctcgcagctgctttgacagcaacggggttgcttgtgagggcggtaagagatgttgcggcttcataaacaacggtgctagtgggcgcgtcgaggagctcgagcataagtttcaggtatcgcgactatttttcgttagtgacccaacactttgatttgagtccaataaacgcaccttattctgagtgttctgtactgcgtccttccggaggaactccaactcggctagctggagcaactcatctgtgtttggaattgtgtcaaaggtggtgcgcagatactcgagcgccttctggtgactgatggacatgagtgctgcaaaggcattgcgcttgcaggtgctgtcggtctccgattcgaggaacaactgaagcaactccggcgcatcgggaatgagcgactcggagtgctggaaaatagacgacacagcccagactgcattcttgcgaacataggcgtgacgatgttgcagacacgaacgtgcggaggagaggaggggctcaataagctctggttcgcggagtttggagaggaatcggagggtattgcctcgaatgtattcgttgggatgttgaagatcgttgcgaatgccgttactgcgaaaggaaaaattgtcagacaggaaatatcatatagcaatggccagggggatccttaccagaccaggatcatctcttgcttgagcttgccggtagaatcgtgtttggggcagatttcatagaagaagtaaagcaacttcttcaatgacttgcttttcgacggcatcacgaagcgaatgatgtgcatgaggatttgcggcattgggtctccattcagcatgatggtgacaattgtccgcattgtttccaacttggtctcatcggtgcctttctccagttgcagctttagctcctgcacggtcggctggtcggcagtattgtccacatggagcaaactgtaggtattttccagaaacgacgccatggtggtggattgggaggaataggaacgaaaagagctgcgagttgtcagttccggggttgttttggggacacatcagcatgtaggaataaacacatacagtagaggtaattctcccgggaacaggagtttgcgccagatatcaagaacaagcaattagtgtaaagcaacacccctcgccagccctgaaatcattagatgttatatgatgcgcaatggggagggaccatcaacttgtcccttaatctggccccccggcgccgtctgtgtggatgactaagccacaacccgccgcttttcaactgccacttcgacgtcgattgctgtccttcttcattcacgtacgaactctacgattgagattcgccaggatgtcgaatgagaatttctacctccgatactagtaaggatgatatgagtgagcccgggtttcctcagctgctgacggtcctcacagctcaggtcactctgggcggtttggacatgagttcctaggtaagcctacgtgccggtcataaacactttcctctacgcagtcgctaacttgcacgcagagtttgatctccgcaccattggcgaaggtagcagtgccgccgtacgatatgcgaacaactcgaattaccgcaatgattccctcatccgcaaagaaagtgagcaggagcatacacaccaaatagaaacgaacacgggctgatatagtaatagtgtgcgtgagcgatgcgatggtcgaagaagtgaagcgcattatcaaggatagcgagatcctcaagtatgcacctggattacacaacaggaagaacaccctcgctgaccccatctagggaggatgactccaagtggccacagaagaacaaggacgggcgtcaagagctggagattcggattggaaatgagcacatttccttcgaggtaattgaccgaggtatttcacggaagcagccatcatctaatactggatcgtatagaccgccaagatcggctcgctagtcgacgtgaccgaatccgacgaccccgaaggacttcgagtcttttactatcttgtacaggacctgaaggcccttgtattctcgctgatctcacttcacttcaaggtatccacaatcttgcccccatgcttgcaacatcttctgaccatccctgctttacagatcaagccgatttaagtattgagcgcataaaagaaaattgaagaataactgggtttttttgtttgatgatactcattaggcgttcattgagggttacctgggatgcgaactcaattatagcgcagaaacaatgagattgatacccctcaggcatgtctgccttcgatcctttctaggcaatttaattattctgcgtgtttgtagctgcttgtagtatgaagatgtcaaagcaagatgcaaaacatggcagaagatacgtagcttgagaatgtgtgttctaaccttaggtcccaggagtgtctccagtccagtcctgcaacgcttgatatatatccacttccctgcaatgccaagtcagcactaattcctcaagcttgggccaatcctggaagtccctcatattcgatcacctcaataacagtggtcaccgggatactgtcgggttcatatttgacgatatcgggaagtacatatcaggactggggtttcacctgggcatccagattgggcttgtataaggaaatattgaaattacttagtggttagtaaatccaaagtcgcgcttccttcaactcgtcctcgaatgcccaagaatgcctaagatgcccaacctgtcctgatttggaccgaatgttggtcatgccattgatctttccaacgtgcaagattgtatacaaagtggatgaaagccgttgattggcttgattggcacgtggcctgaggcatccaccttacataaccaatattgaaagtggcgccgcgccaggcgcagaaacagctgacccacctggactgtccccgcattgctcgttcctcaagccttaaaagacttagttcgctgatctcaaatgatccatcccccttgttctctgtttttctcacaattttgctctggagtgtcttgcttcgattcaatgtcccgtcccctctttccctgatttgcaatgccgactccgagtaacaactcgatcgccgcggcgatcgccgcccgcacgacatgtccaccggagcccgaaaggatctcggcttggcgagactcccccgatagtgtatcgaacagcgatcctatcgatgctatttcacctgataccccaattgcgccctccatgctgagtcgatctgatgatgccggtactcctgagccgatgaaagcgggaggaaagccgacgggcgtcgaggaagatgacccagtcagggctacttcacctgtcgagtcaacctgccttcgcagccagtcaccagcagcgccctcgggatcctcactcctcaactgggaattctccaacgttcgtgtaagtatcgaggtcggctatatccgaatattctcaccttctgaccatcgcattagctcctcccgaaccacacctcgtttctccgttcaggcagcaagttcgctggaactcagcaatcagaccgtcaagtctacaatgtcgatgtcgagattaaacatgttgatatggccgagtcttatctctgtggctaccttagaatccaaggtttgtgattcgtgcgcatcagggacgtgcattgaaccttgctcaactaatgtttgttgttctccacaggcctaacagaagatcaccctaccctgactaccttttttgaaggagaagtgatcggcaccaaacacactttccagactcgtaatgaggaatggggcgcctcggaaaagacagacttgcaccattggtctcggtttcccgcctggcgtccgctggctaaacaggccaaaagagcggatttcacataccgcaacttcgcccagcgtgaacatatattcatgagatggaaagaatctttccttgttcccgaccatcgagtacggacgatctcaggtgccagcttcgaagggttctattatatctgcttcaatcagattgagggaactgtgagcggtgtatacttccatgcaaagagcgaacggtaggtggatgttttgttgctgaagattctcgatttgatcctaacaccatcacagatttcagcaacttgaacttaagcacgtcgaagatcgtggatgtgcaccagcagtcgaattccgctaaatatggccgaacttgcttgctagtgccaaaacgatctcatatatgacttcgtacgtgactaattcggtcctcgtgtgtctcatatcctcttttgttattatttccgatactacacggctaagtagtgtttcttggtcaccattcagaacgagaagcttggttctctcggaactccattgagttcactatcccgtttacctttcctcaaataccctctacgctctcagtctcctctcccctaaggctattggagtgttgatcatcatttcgacagctcatttcatgaggatttccaagaccatatccattttcaggcaaagtctaaatccacacaaatcatcctcagattgaccctcatgtttcacgatatttcaatatacgaaacggcgtttccgtccccgattccggcgacctggttctggttacccttcgtcctctttggagtcctaatctctcatttttcacttcttgttttcttattcctcacctatcttctgttaaattagtgttattatctttcatccaagctgctggttgaccagcctagttattgaaaaacctcactaggtgtgctttgtaatcgtatatatgctcttagactctagggctgtattgatattgctattggcggctccttcgctgttccatccatacaatagatcacagcgcaaagaaacgggcattcttagggactatagtcggctcacaactgccgattaaacactaattaggatgaccaacatctgtataaaacaacggctgggcatgtatcaatcggacacgacggtcgatcgttgattgttcgatctattcctcccgtaatgtacagatgaaccaagtgaaacacgtgaatttagaacaaagcacaaatacgattactacgtatacaagtagcaaaaataaccatgcgagaaacgagatactaaagtagacttggtcccaatccgtttacgtccgagggccatattgagaaatgccaaaagatcgttgcgccccagatagaaactcacgcgtgaaaacgaaacaaataaagaatcaaggaacccaaagaatgcatggacctgagtttcaggacatatgtgaatgaagcgatggttgcagtaacatgagatgacgttatggtatgacttgggcgaacagacgttaaagcaagaaaaagaggcgagcaggggtatcacatgcgatgccagttgaagaatggcgagatcgagcgagtttggatagaaaggacgcttttagattccatggtaatcaatgttcagatgtggtccacatagagagggcgacaacttataaatagagattaggaaggaaggaatggcgcgagaaggagaaaatcacatatatgccgagttttgacgagagcttgagttggaaccgccgctgctgtaatcgctcggagtaggagactccaagacaacttgttgacgaatggagatgatccattcgtgctgtaggagctcggcggcagtggcgcggcgagcgggatcgcattcgaaacagcggcgcacgaagtcgacaccctggtcgctgagttgatcgcgagatgggagcgcgggctgtttgccttgagcgatgttgtacataattgcccactcgttgtccagcgtggaccatggccggcgcccagttgccatttctaggaccacgcagcccagagaccaaatgtccactgcgccttcgcggttgtccagattcgcatcgccacggatcacttcgggggacatatacatcggagttcctgtggtggtcttctggtttttgcgctggttcgtgggatctttggccggctccttgaggccagctacagggccgtctgatggagcaactgtgcgacccgagcgagcgatgatcttggctgcaccgaaatcgacatacttaatgacaccgttgtgatcaagcaggatattctcgggcttgatgtcacggtgcacgatatgtgcttcgtggagatacgctagaccttctaggagttgaagagcataaaccatgatgaccgtttcgtcctcgatacgtccgtgctctagcaagctagcgagcgagccaccggagcagtactccatgaagatgtagaccttgtcacggtgcacctcgatgccgtgataggagacaatgttgggatgatcgagcacttcaagcacgcccatttcgtctcggatctgctgggcgatcttgggaatgagctgggggtcttgcaggcgaatttccttgacagccatcaaatagttgctgtccaagttgatagctacatagacagacccaaaggtaccaccgccgatgaactggccttgctgccaacgcagagtgacgttggtagccgacgatgacagcacagtgagtgacctgtcagcctcatcagatccttctagcacctttcctagagcctggcgcttcgcatcttcctcgattctcctatcttcaatctccacaacacgcgcgtaccatgtgtcgcgaacgagttttgatgcttcctcgtcactagtgatccgaccagcgccaatctgtcgggcgccgttgcgttcttccatacgtttctcgttcttcgccgcaagcgaggatcgtgcacccatgatgtcgaagtgagagatgagaagggacatgcatcccgccactttcaatctgaaatcactgaactgttcttggtccatagacagaagatgtcggctggatgtgatcgccatagcaaactccaaggctgctacagcccacttgaacgtctttcggtccgcagcgtcacactcatcacagatgaacgcgacccagtcgagagacaactccactagccgggcgctgttcatagcacgcctgttagcgtcgacatagttggaggaccgttttccaaactctgttgcgaatgcatagcaggcctggatcaaatcattgttctgccagtttctctcattcagctgatctttgatgatagccacactatccataatggtcatggacagtttgaaagagatcttcttgatcttattcaactcgacatttacacgtccaaggtttgcacgttgttcaatgaccatatcaagttggatgcccgtgagtcgtgcgagctccacacgtgcattctgcagtcgttcttgcatgcctccaacaacaatacgtagcttgcccagcctcacatccgttggatgttccaagaactccatttgcatttcctttcctccccaagcaagaggcctttcgggtcggatggccaggacatagggaacatggatatcctgggttggatcatcttctttgaaggaggtagaaaggataccctggatatcagcgggacggttccataatgcatgatgtgcaatcagatacactcctttctgcccgacggatttggtagaggtgacaaggaaatggtcagaaattaagagtgcctcaaagaaatcataggcgatatagctcgtgatgttgtactcggtagcattttcaaacaattgacacagaaacttggagaatcgatagagcttgcgctgacgaatacgcgttgaatccaagatgctcttgtatcgtttgtccatatcctgtacagtttccttgggtcgcgggacgagctcacgctcaaaatggatcatgagacgctgcaatgatctggcagtgagggcactgttgttctgttagttctggaaacgatgcaaagcacgggaaccatacctaaattgctcggccacctcaatatctccaccgtcaagccggcaaccgatatcataggagaatccccattcctgttctagaatttcggcctctttgaaagtgtttttgttggcattcagcttccaattgaggagccggaaatagtatttcatagcatccaataccgaattgtcaaagttttcatcgacacatggcggcaaatcccagccgggttctggcctcgatacatcaaggtagcgaaatttgatatcgaccgccactttcatcaggatttggaattgggaaatcatctgatcgatcaaaatgggggcttgctgggctgggtctttcatgttcttggcataggacagacggactcgaatgatttcctggatcaaccgagagggaaagttgatcaaagttagtagttcttcgatatatggtggcaggtgccgcgcagcaaatgcttccgagttctcaattaaagtagtctttgctttctggatgacgacgagaatgcgaagaagcatgccatccttgtcctggagcgtcttcaagccatcttccttcataatgcgatcaaggaaggacgaaccatccgaaagatcgtcctttgcagacttcatcctcggctggctgaaatcgagagcctcgttccctacccagctctgcagcacagccaactcggtattgatgagggccgttatgttgtgccacgcaaagatggctgcgcgactagaggtaaattcctccgaggcaacacgggggttcgccagttccatttccttgtgcgaagagtagagaatctcgcatcgctcgaccttctccacaatatcctcgacttgctgttttggcggttttccgatctcagtctcgcctttaatctggaatccaatgatatcctcaatcacaggacccagacgtgaccgtgcatcctcgatcaactttcgctgcagaggaatacttcggccgcacgtccttgcccgaacgccaatccagagtgcatagctctgggccgccgaccgctttgactccgcggatccgatgagtcgctgcttttcttgtttcacgacatctcccttcaagactgacgccagcatggaatgccactcaagcctctcctggttcttgggatgtttcaattcttccgtacttggtagattatcgtccgggaggaaaagttgagtatcagggtcgtaagaatcatcttcaaacggcacttcggaggatggagagggttcctccaagtcgccatccccttctgacatgaggtttgattgtgagtccttggaatggtgataccaggcttgtgggttcgctcgaatccgttgaacgtaggctttctcttgggcacgatattgcgcgttcggatcgcgtcggttccctcgtttgactgacgatgatcgttggcggtcttcctggagactgatgtattgcggtgggcgccgctgtggggcatacgtatttgatggcgttcgtgccggggcggacgggcgctgagggcgcaaatcgttagaaattgcatcaggcttctcaaggagagtggtagcgccaatgctaattccacgtggccgtgctgtcggtggattagaccatggggtaataacggatgagatgttcggaggggaagatgtgatggtgctcgcaggtgtttggatttggtcgtccatggtctctccaaatgatgagttggctctcacgggatactgggggaattcatcagaagaagagcctgagccatccgaatcagggctggggatttccggatgctgcatgatgattatcccgtgtgatggtccgagagagcacgtctggtgttggaccaaggtgataagaggcgaacacttgtggcggtgcattgtggctaaccggatgacccgtatctccacccattactgtttgatctactgggaatctttcctattttaattctcatgttgtaactacgtggcatcaaacttgatcctgtatttgtatgaagtccgagccctactacagaatatacgcgtccaatcttcagtcagctgctccattgctcagtccgtgtgatctgtgatctcacaatatgctccatccttgtaaggacttctaatacttgctttttcgtggctttgcattcgagattgtgaaaattacatacaatgcataattaatccaagattgtaaataagctctatcaatccttttatcatctcgttctgctttgttatagtttacgcttgaaattggtaaaaatatatttctgtaaaacatattttgaaactcttgagcagttttatatagacttcattgggctagttacaaggctttttaacatctgcttagtaaattttctatattctaactaattactccgtagttaactaactagtacgtagttcgagaaggtgaattccaaggcattacatagtcccttctggaatgtgaaggggctcaagtaacaaaaaggtaaatagaaattaacatacagtcattggttaacgagccaaattaagttgcgagaaatggtccggggtaagattgagattatataagagagtgtataactttctcttcggatcgttctgtgaacaggtagtgattagtaagtaagacattaaagttatgggtaattcgattatattcctgttcagataactagagagccaatgtcttccgagaatgacatacctactgttgagtggttgtggcaccacgatgggtgaatctcaacatgagaacgccttttgtgatatttaatagggtatgtatacgttcagatagtgctaagaccctgttggaaagaggaaagagaacaaatgacgtacattgtatgtaggcatcgagaaaagtcgaatcatttgaactatcggacactatccggggaactagttaaagaaatgagcatgtgacatgactggacatgctagaacttcaaggttcgaggagctagtgcactattttcaaactattggagatttacccctgactagagtaacattgcgtctaggtatggagtacatacatcgatcgtatgtacatcgaagagtcgatcagtggatcggtgggttcgagaatacttcattgaagatcattgatactttgcagcgggtcttaaggtattacctgcatagtctaatactctaaaaagcgttaagatgcaatatattccctttccttgatcgaaccagacccaagtcactgggcatcggaatagagcatacagcacggcaaaactgacctatgatcgagcctacgtcatagatacatacgacgatcgaacatctgatgttgctgaagaaaaatagagcaagaagaccaaagcgcaagagctccgcatgtattcacagatctacgatgatttgatgttgagcacggagtagagttcttggcccgagagttcggcacatgccgggatgccgaatcagcctctaaaaattcccgccaatgaaagcgtgggtgcttatcttgacttgatgtacgggatactttccttggttgtagaccctgtggcaaagagtttagttttcccgccccatgcgttctgcattgtcgtgtggaaccgggtgtgacattcccggagaatggggaatccactggacgatgcggagagaatagcagaagtacggatcctgaatagttatgtatgttgtataggtagattgctatgcgaaacatctatgttgtacgaagaaactgtacactgccaaagaatcatttctatcagcaattgatctctgaactctacatattttgccgtctggggccatccttggtcaatacgaaacagttcaagagataatccctcgcatgtcaaagaatgtatgtatccatggatacgatgtagaattgtaagataagggaaatggcagctgtgattggttggcgcaacacgagacttgagccccggtgataagagatcaaacctccaagggttcaaccacttcacgttgcacatggtaatatcctagttaaaaggaaactcatatatccaacacaccgggtcagctttccatgggtcactatgcagacacgaactggacgcattcgacaaacggattaagcgacagaaaagcatgtactggcccgagaatgataagcaaatggctgtgattggctgctctccaacctcatatctacagccagtcgttgcgggcccgtccaatttcgattcctagtattctcttctgtcagtgaaatgactccaatctatttatcactttgctacaacgtaagttggacctgcatgacccctgcttatcggagggtcaatgcatcgcgtttgagatgttcttcgcaagggaaaaggcagagatgtcgagaaacaaacaagtagttacactgcagagtaaacatggcaaaagcacatacccatagtccgtccgcagtgcaatgtccgagtatagctgaaggatgccaacgcaaggacccgtaattccccggtctgcgtccatggagtgtataccagatcccgccataaacccggcatggctgaaattggggcgggcttggccacctgctatcggtcaatcaaatgaatcatatcataaatgagaatgaccagcttccactatcggaactaagatcgatggtctggtagacttctagcgtcggatggtggagtcatccttagtttttctgggacgctgccagttatttaattaccagtgtttgtccttgcagggtagacatatcacttttctctcctttcactttcacagcccggtgcgtgaaagtattttctatttcttcttctccacctctcacaacgcaggagatctgtattcagttctactgagactgtcgttcgccccctatcacacttgaaataaaattggcctcgcctaggtctcactatggctgaatatccggttgcgtacaatggcaccaccgacactggtggtgactcgcttcatgatgacttgaacatctactacagtgtatgttgtataccccataggagtcaattgagacgcgtgctaactaaagtgtggatagtctggtgatatctcatgggtcattgtatccacagccctagtgttgctgatgattcctggagttgggtatgacttgacccatcccttcctacaccaaagggctttcactcatcactcgattatagattcttctactccggtctagctcgtcgcaagtcagcactctcgctgatatggctctcgatcatgtcggtcggtgtggtttcattccaatggttcttctggggttattcactggccttctcccactcagccggtacctacatcggtaacctcgataacttcggcttcaagggtgttctcgccgcgccatctgtgggaagtgacaaggttcccgatctcctgttcgccatcttccagggcatgttcgccgctattacgtgagtcactcatgcatccatcatggagatactcggaacatcaattgacggtttcttcttagtgttgctcttgctgtcggcgcagtcgctgagcgtggtcgcatgctcccctgcattatcttcatgttcatctggaccactatcatctacgaccccatcgcctgctggacatggaactcgtcgggatgggtgttcaagctcggaggtcttgacttcgctggtggtacccccgtgcacattgcttccggatctgccgcgctcgcctactccctgatgctgggcaagcgtcgtggccacggaacccacgagctcaactaccgccctcacaatgtcacccacgttgtcatcggcaccgtgttcctgtgggtcggctggttcggattcaacgccggctctgctctctctgccaacctgcgtgcggttatggctgccgttgtcactaacctggctgcctccgttggaggtgtgacctggtgtttgatggactacagactggaacgcaagtggtcgaccgtcggtttctgctctggtgtcattgctggtcttgttgccatcacccccggctctggattcgtcactccctgggctgctttcatcttcggtgtggttggtgccattgcatgcaactacgctactaagctcaagttcctccttggagttgatgacgctctcgatatctttgccgtccacggtgtcggtggtctggttggaaacctcctgactggcattttcgctgcgtgagtgaacctacttcctgacagtatagtctgatcataaactaacttccattatagtgattacattgcgcatctggatggtgtcactgagatcgatggcggctggatcaaccatcactatatccagctgggataccagcttgccgactcggtcaccggaatggcatacgccttcttcggaacctgtatcattctcttcatcatgaacctcatcccgggtcttagcttgcgcgcacccgaggaagatgagatcatgggtattgacgacgccgaaattggcgagtttgccgtaagtttcattattcctaagtcggccacaacgcgttctaacattttactctatagtacgattacgtcgagatccgccgtgatgttgtcgatggcgttgagagctcagaaactgcctccaagcgcactactacacccaccggcgagattgacaccaaggcttagatcagacttgatctgacggctgttctttctttaatattaatatgaggcaactgccttccttcccttctttcttcccttctttcctttcacgttaatacttctttttttcggcgatggcagagtgtcttcaatatctattaccgaactatagatatttgggatactctccggagaccaactttcactttgatagcattcagatacccaaatatcaaattccattcaaccattccgggcagcaaatcaagttaatagagtaggcaaagcgtgacaatgtccatagtagtgcatgagtaatatttgagacaaccccagacaaagaagtaaccgtgagtggcatgccattgaatatgagaatcctatactttagccaatgatgtactcttacgtcgtatactccgcatgttgtagagagctagaacgcgggatccacccatgtgcacctgccggagcgccgcgccgagaaacacggcgaccggcgaccgtgtactgaatgcgggcaatcatcgcaaaccctccacgctcctcgcaaccctctgggcacattttctcttccttttattcatctctcccatcttccgaatagtttgcccatcgattgtttcatcaaaatgtcctttccgaccgacgtggcggagtttgatagtgacccgcgcatctcgttctcgagaccggacaacagcttcctacttgagaccaaggatggtcgcgagttcttgttcaataccatcctgaagagatgggtcgaatcggtatgtcatacacgtattggcacgctggcgctttgcgctgggctgttcgccgacaatccccgctaacctggcttgcgactctagatcgacgagaagctcatccgccagcagcaaggatacggtcccgaagaccccgagagtgagatcgttcatccccgcgatcgtaagaagcgaaagcagtcgcaggagccggtaagtgttctggtcatttatgccaacttggtcgcattgaaactgacttctttcgtctgctagaccgatgagcccaaggtcaagaaacctcgcgtcaacaccgctgtgtgggttacaaatatccccaccgacgctaccttctccgagattcacgagtcgttcaagaaatatggcatccttgcggaggaacttgacactggaaagccgcgcattgtaatgtacaacgacgaaaacggcaatttcaatggcgaggctttggtcgtgtacttccggcctgagtcagtcaccctcgcgattcagctgctcgacgagacggacttccgactgggtgtccccaacccatgtggactgatgcgcgtccaggaggccgacttttcgtacaagcgtgaacaggaagcggagcccaaggttctgactaccaaagagaaaaagaagctgaaggagcgagcagatcggttgaataagtatgtttgttgatcatggcagtagagtgtttcatactgactcgactgtgataggaaactttccgactggggtgatgatgaggctgagcttgccgccaaagccagacaggctgccgaggaggcgcgcaaacatgtggttttgaagcatatgttcacactggaggagcttgaggtttgacacacctcttccaaagttgccttgcgcgaatatggaacccagctgacctgtaattataggaggatccactcgccactattgagatccacgaggacattaccagcgaatgcgctaagattggaccggtgctcaaggtcatggtctgggacggggaggctgatggtgttgcgaccgtccgatttgtgtccgcagccgacgctcgtcgctgtgcccaggtaggaatctcagtttgaatcaatgtgattgcaaatactgaccatcttctagagcatggacgggcgtatcttctcaaagagaactattgttgcttacatctggaatggcgaggagaagttcaagaagcaccgtccccgacgcgacaaaaaacccgaggattcagacgatgagaatgagcgccttgagcggtacggagattggctcgaaagcggtggaaacaagacaagcaagaaccaggaaaccgaaaatgagaaggccgacaaggacgagaccgacaagagccaggagaccaataacgagaaggctgacaagaacgaggctgacaagagcctggaaactggtaatgagaaggtcgacctggatgagaccgacaagagccaggaaatcgacaagaactagctcaaccgaacagaaaacagcgcaagcaattccaccgaaggagcccagaacggtgggaactctgtaccaactgagctaatttcaaacaacgagtgctactgaggggcaagcgaatacttccaagtgaaaggaaagccacgcccaactgaacgatatccaaacgacgagagctactgagaggcgcgcgagtacttccacgtggagggaatgcggcgcccattgaacgaatacccaacatgtatcatatttttcccaattgaaaccattgaaatattattgtactatcttatgtagttgtagttgtagtgaagttagtgtatatagacatagcaaccgaaataggaagtacaagatcacgcgccaaagaaacgcaaatatggttcgcacctccccgagtcccgtgatgcggctatacccaatcgggccccctccccctgaagttcagttgttgacttgttgatcccacacacaccgctcaactggccctcttgctttctcttcttccccatcctctctgacttgtcaccggtcatcctttttatttccatctcttttctaataccttcaaaatgcgtgagattgtatgttatccccatccagacgcgtctttgttttcatatggcccctgagccacgaccccactctgaacagatctttgctaacatgctctaggttcacctccaaaccggccaatgtgtaagttcgacatggaacattcctagaaacattcttcggctcgtgggactaaactggaattgggttatagggtaaccaaattggtgccgctttctggtaagtgccgagcctttttttcgcgttgggtaccaattgacaaattactaactacattacaggcaaaccatttctggagagcacggtctcgatggcgatggacagtaagtctaaagatgatgggctttccggtggttcacatgtctaatatcttgctaggtacaatggaacctccgacctccagctcgagcgtatgaacgtctacttcaaccatgtgagtaccgcgactgggcattgattaagcgtgcaccatctgatcggatgttttttcttaatctaggccagcggtgacaagtacgttccccgtgccgttctggtcgatttggagcccggtaccatggacgccgtccgctctggtcctttcggcaagcttttccgccccgataacttcgtcttcggtcagtccggtgctggtaacaactgggccaagggtcactacaccgagggtgccgagcttgttgaccaggttctcgatgtcgtccgtcgcgaggccgagggttgcgactgcctccaaggtttccagatcacccactctctcggtggtggtaccggtgccggtatgggtacactcctgatctccaagatccgtgaggagttccccgaccgtatgatggccactttctccgtcgtcccctcccccaaggtctccgacaccgttgttgagccttacaacgccaccctgtccgttcaccagcttgttgagcactctgatgagactttctgtatcgataacgaggtatgaagtgcgtcggaaatgctgacatgaagaatactgacaattctaggctctctacgatatctgcatgcgtaccctcaagctctcccagccttcttacggtgaccttaaccaccttgtctctgccgtcatgtccggcgtgaccacctccctccgtttccccggtcagctcaactccgatctccgcaagctcgccgtcaacatggttcctttccctcgtctgcacttcttcatggtcggcttcgctcccctgaccagccgtggcggccagtcttaccgccaggtcagcgtccccgagttgacccagcagatgttcgaccccaagaacatgatggctgcttccgacttccgtaacggccgttacctcacttgctcagctttgttccgcggtaagatctccatgaaggaggttgaggatcagatgcgcaacatccagagcaagaaccagagctacttcgttgagtggatccccaacaacgtccagaccgctctgtgctccgttcccccccgtggcctcaagatgtcttccacctttgtcggtaactctacctccatccaggagctcttcaagcgtgtcggcgaccagttcactgccatgttccgtcgcaaggctttcttgcattggtacactggtgagggtatggacgagatggagttcactgaggctgagagcaacatgaacgatcttgtctccgagtaccagcagtaccaggaggcctccgtctccgaaggcgaggaggagtagtaaggattccccacatcatccggctttcgaacataacgactaacgaatttccccctatttttagcctcgctgaggacattgttgacgaggaggtttaaataaatctcctttgagatttgttcaaagtaatacccttgtgaagcctacattctctaccattcggaccggctttgtgggcgtaagccgcgaacccaatttgtttgagcgctcctaatttacacccttttttgtctattttcctacttggcttgggtgatttgttcgacccctccagaatagcacatagtggaaatgactttcaatagcttttttaatcatgttaattgtagtgaaggattggtgcggcagaagttcatatgggccagtatactagagttcataacttcaaagactatgtcgtggcaatctcacataaaaatgacgctaagtacacctcgtcacaaccgatccctgcctttctttctacagttcaatggaagggacatttcccagtccgatactccttgaactccaccagagtctcctctaactgcttcctccccttcccctcgaaatacttcggtccaatatccgcaacactatatccagtgggataatacttatccccctcgtcacctggcacagcccgccctatagcccgcgtcagcaatgccatcgggccccagcggttccagaatgtgggcttgacatagtacggcgcagcctcccactcggtaaggaagaagcggtcgttctcatccggctcctcagtggacgaagcgaagcgcatgaagtacggtcgtggcagagagaggtagcggaggaatagcctgcgggctgtgaagatggttgagagaagtgctgtgcagaatgcggaggggggttcgtagctgtttagtcagtagttagaggttagttgcgacctgaacatgcaaaccaaaaccaagaaagaaagaaacttacaacatcgccttcctaagcctatcgtccatcataaacgaaacagcctgcaacccagccggatgaaagaccttaggtagcatataaagcaggacagcagtagtctgatccgccgtctcacgattcttaatatcaggcaccatgcatctcacctcatactcatcagcccaagcagtcaactcctcgagccactgaatcccatcctggaacccgactttaccagacggcagtttctcatagctaatatccagcgcatcaccggcactcttccagaatgtcccgatagcgcatcgctccaggtcactcagcttacgccactcatagcgatcgatgaagcgaatcggctgcagcgcgaacagcgccagcgtaaagagcatatcgtcatcgaggatcttaccagaggccctgtacccgctgtgcaggtagcgcgtccgggcaagaccgagacatgcgcgcatggaagtcgggttgttgccgacccattcttgcacgaggaggctggtatctgtgtagcgcttcagggaggtatccgggttggagaattgggttgtttttgcgaggaggcgggatattgaggggatcccgtatgtcttttttatagttagaaaatgcatgtgtggatcggtagatcatgacccggattgtgagtgtttgcccatgtgggtgggttggtaactggtcttgtttcatacccggaataacgcgaattgtaagctcttgatgaatatgaatgggaattcgagctgcgcgacttgtttttggatctggaaggcttcttcgtcggtcattttggacattgactcccgtgttggataggcatattgtttgtggagcttgcgcaggcgttggaatcggaggcttgttgttactaccggccaggcgatgaggaggcctacggcgtaggggagtagttgggttgtcataccccctgcttgtagtgaagccagggcatcggtgtaattcatattgacgtgctggtttggggatggcaccacgacagggttttccacgaggttcaaataagaaagtggtggtgacgaggtccacggcactggcccatttacgttccccacaaggtttatgtactattttcttatcatcgtaccccgcgtatgtcagcacaacatatataactaactagagaagcatgtagtaaatatatgtatttactttctaatgtagagattgtaattgggcagtttcaaacgtggggccgaacacattcctgcgttatctaacaggtgcttaagccacagtatatatacatcgcacatgtatgtcacgggtcggaagcactttggcgacgatcagaagcttaaggtcaatataactttgctttgcatcatttaaacctttattgaagttcacatcaggtctttacagttcccatgttatggctatatactctctggtttatgttgggaggatatacaatgctctgcccccacactttctggcagatcattatgccaacacataaaaagagtgacacacactagcgaccaatcaatttgagctcgaaagcccgcaacggtgggaaaaacagcatagtgaagcccgcacccaaccagagacccagatcagctccgccagccatctgcgcaatggggccgatataatacgcctgagactaaactgacgtattagcaagacgcagttaactggattgggagtataaagtcttaccatgccgacaattgcaccagcccaaccgataaggaaagcaactcctgctgcaatccccaacggcaatttatcgcgacagttccactgagaccagtcatagcctctatttcgacggaaaatcatgtgttcctcgaagacaatcacaacgaacatcatgacccagtatccaatcagaggcaggaaagacttgaacacctcgtacagctggtcccggcctcccatcgcacatgcagcatagataaccgtagcgagagtcgtccagaccggtcggtgaacctttccaaatatcccgccaatcatctggaggttcattcccatcgagtacgccccgggagtgttattagcaaccaaggcgaggacattgataacagcacagaatttcccgaaccccccgagaccgtcgtatgctgtcatcagcacgcctccgggactgctgccgtacttggccgcaagatgtgccgagctggcgataacggttccgagtccgatgcccatgaggaaaacaatcgacatggcactagtggcggcgaagactgtggctaggaatatccgggagctcttcatctgcggcgggagatagacatagtaatcggcggcgagcggggcccaggcgagaggaatggacaaggccagggagaagaaggtaagtcttttggccattagttgctctgtcgacattggtgtctggatgttgaagtcgaaatttggccctgctgagcccaccatcacgcatatcaccagcagctgtggcaaccaggcaactctggtattaattagaatatgcattgaagatatcctgggctgccaacacttaccgctcatataattggaagattttcatcccaaacagagccataacccagctggaaacggcgatgatgataatgcccactatcacggaaagatgcccaccagagaccacggacaaaatctggccaccgacgacgctgtttaccatactgtacccgatattggtgaagaggtttaggataatgcaaactttgctggggtaataacccatgaaatatcgggccacgatctatcaagtgcatgagcatccgttcttataaagtaccttctttcccttgtgtcgtgaatcaccgatatttcaatacgtaccaaagtcctgtttccgctcttcggtccccatatacttataaagccaaccgtgaaattgccggctaaacatccaaatacagcacagagggccgcatccctgtagctgaggcctaagacgagcgtacccattgatccaacaatgatattatttgtagccaatgtcatgctaaaccacattaacagcatatgaagtatggttgaaggcgttattggctctcgtttgttgataggaacgggctcgattccgctgctctccacatttttcaagcttgcaatccatcgttgccatcttgattgcggcacgaggtcaggcttttcgacggagtcattagagaagctattcgaggcggttttgtcgaggtaagactggctcggacactcgagagtactcgagctgtcggctttttcgatatcttcgagcttcattatcggatatctcgatgtgtaagtggcttgtaaggattaagctgttcgtaaacaaaagccttcgattcaaatccaccactagacagataaatgccaaagagtctggcgtatagataggatgtcgtagatccacagctgtacaacggtcataaaataggagggaaatcggtagttcgtatgaaatatgacggaggggggagagctatggaatgatagatataaggggaaaaatatccagccagtgcaccatcgtaaggccgttaaacactgacatcaccctgtctacctagtgaaacggtgtaacgacccgagggggaattaaatacataagcattccttagcaatcaaggtaccaaccgagcagcttgcataagtgtccaatgatgagcactagatttgcattaccgcaatacagtcgggaaggaacacgcccagcagattgtagatcatctatcgccttgtagagagaaaagaactacccagctttatcccaaagtggaaggggcttcatcgtgctgtgcaatattgaccatccacaaggacacccaccaacacacatattcggtggattggtaaccatctcatgataccatcaagggaagggataggcgcatgacagccacacgatgaaataaaagtcccgccggcccctgtgatccgcgatacatttcctgtatggggtaagtggcatgctggaaagctccgaatatgcatgctctggaatgctgttgatgcaaggaatatctattagctcatgattctatacaatgctcagatttcaggaggcgggtccgaaatagaggaggaggatgatcagcccaaagctccgttgagcaagttccgcgagaaatgtagcttgtgattgatgcaggacgaatacttccccggggatctcgacgatttgctctagccctaggagaaaaaggtccgagggaaggggtacttttaaatagctctgattagttaatgtttactcctattaagtcactcataacttgacttcattactatatatagagagttcctgcggctattcggttgtcctcggtatctctcatagcccatatgagcacaagttgaagttgatacattctacagaggctaccatgaaggcgtgaatggtgttacacatcccgccatctctcacggtcttctgtattcacctcagaagacttgtacgaatgggatcccgaactatgtgatattacgtagcctgagtctttagctcaggtcatttcctacaagtccagctaagctttcctcctgtctcttctgacccacaagccggaatccgtgatacggatccgcgaaggcgaattctcctagcttgccaggcgttggcgtactgcgtgagagaaatgctgattcgtcaaaaagggcttgactttccgtaagattagattccactgctaacatggcgcgttacacccggtatacaagtgctataatatatctagtagctgtctgctagaggctttctaattcgagctgctaatatgaggacgcctagattccgggtttctaagcaattttaagagctaaggcttatagttagctacttttctggtttgaatactattatctagatattctggctttgttcgtacactaggaatgaatatatatcgtctgtcaataggaaactcgattattatatgtcgcttctttattgtggccaagagcgagattggtgtaagacgaaaatataccttgaggacataaagtattcgatttaaagatccaaaattttcaaaggaggcacaagaagggaaatgagagcagttgatctggtctttctgtcgggaaagaacagtcaagacactgagagccttgaatttacgctgtctctctgtttctcttctcgatctaccaatatgctccatcaaacgtgtctcatctcatttggttttcttcacttgatcttcctttcacctacacaatatccttgtccatactgaacttacaatggcctctgccgatccaccgtccatatttcaacccagaatacgcgatggcatcgttgtgtggattggttgttgagaggatcagctaggagcatgacttggttgtgagtctcaagagctagacgattattttaagggtacctagatttgtcatagtatcactggggcctttgatgaatggttttcttgtccattctgatcaagtagccagctgtttggattgttcgggttcggattcgggtgcggtataaaaacctgggagaatatgcgtgcaatttgtgcctcgggaatatcttccgtttatgaactagtgtattacagggtatacgactactgtggagagtggtcgatctttttctagtcctgatccactgaaaccctgcatcaccccgcgaaatcttggataaattaaagaggagaggcactcgagataggtaataggtcagatttttcagttccggagccttatatctgctacactgaatgatatcacaacagctcagtgagtatacgacagtaagtgtgtcgacaggtggactgacctatacacctcgggagtcaccgacccgatacccctggagtggagatatgcggagcagcaagcttctgatagaacaagttagaatagacctccttgcagaatccgagaaccattcgtattcgtggaaagttgagaccaacccagcttccccacaggtctgtggagagaagcggcatagcatttagcccaatgccaatccccgaggttgccccggttctaaggccgcttgtcgctgctatagataaaaagattccattccttctgtctggggttctattatatctcccttgacatagttgagagagtgcagacatcatgcggtattctctatgggcctctacgcttgtgctggcttcggctgccgccacaacaacttcactgagtgatatatgtacaagtgcatatgcgaagaaggcgttgccagtggatcaactccagggagttaccgttgatccctcttccatttccacgagtctcgtcaccaacttcactgccagcagtatattctaccctaccacgaccttcgattactgtaatgtgactttcgcctactcccatgacggcattgaaggggatattgttcatgtgcaatactggcttccagctccagcacagttcaaaaacagatatgtgtctacaggtggaggtggttggtatattaactcgggcactcaatcgatccctactggagttatcgttggcgggtacgtatttactcgtatcaatttggtggtatgaatgtctgactgacagattacataaagtgttggcggattgaccgatggaggatcaggaaacttcgatgccgcatttagttccgttgctctcttggaaaatggaactatcaattggcaagcgacgtacatgtttggtaataccttcatacttccgaaactcacagcttacgggtcagctaacataagaaacaggctaccaagcccagcacgagctcgctgtattgggcaaagcgctcacgcgaaatatttacaacgtaccgtccagcgagaagatttactcctactatcagggttgttccgagggaggccgtggcggatggagccaggtccaacggttccccgagcagttcgacggcgtagtcgccggtgccccagccttccgctgggcacagcagcaaaccaatcatttgacgggcaacgtcatcgagaaaactcttgactactacccgcccagctgtgagctcgagaagatcatgaacatgactgtcgcaagctgcgatcccctggacggcaagacggacggtattgtatcgcgctccgacttgtgtttgaagaatctaagctgggattccatcctgggcgcttcttactcgtgcgatgctgtcaccggctctgcctacgtgagcgccacacctgcgcagacaggcaatgtatctgccaaagccatcgaggtcgtcaaggccttttggaagggtcttcacgactccgacggcaagcgggtttacttcaactaccagcctggttcgactttcgacgatcttgtgagcgcatatgattctaccaccgacagctggaatctcgatataagcagtctcggcgggacgtgggttggcttatttatcgatattttgcaggagtccaacattcccagcttggatggcgtgacctacgataccctcaaggaatggatagtcctttcccaaaagaagtacggggatatactccagacaacatacccagacttatcggacttccaagccgccggtggaaaagtcatccacgtccacggagagcaagactactcgattccgaccgcttcttcagtccgttactggaactcggttagggaagttatgttccccaacaagtcatacaaggaaggtgccgccgctgtcgatgacttctaccgactgttcctcattcccggcgtgggacactgtgccaccaacgattaccaatccggtgcgccatggccacagacgactctgcagactcttattggatgggttgagaatggcacggcgccggcgacactcgctggatctggtgagattgaaataatatgtcgttggcctcttcgcccgctttggacttcaaatggcaagaagttccaatgtgtttatgaccaggaatcgattgatagctttagttatgatttggatgcgtacaagcttcctgtgtactaagaagtacctcgtcaagtgagggttgcttctatttgatgaaaacactgccagctctttcaatcaacagctggacttcaacctgttctattcaatcttttctgtgtatttttatttatccccatgccccaaaaaggtccctccttaacctcatatttgagtactccgtactagtgctagtgatatacatactccaccatggttggccaataattgaagacccgcatttcgcacaatgtggggttcgaacacccgacatgactggctgatactgcacgtgacttccgaatagcgtaggaccaattatatgtcatcataaagacccacacccgtataacctcaaaaaggacctgtaaaagaaaaaaaaataggtagcttctctttgattgagcgtgtcatccttagtgcaggggccatgctaatcttctctgtatattttcatttgaccatatgccccgaannnnnnnnnnnnnnnggtagcttctctttgattgagcgtgtcatccttagtgcaggggccatgctaatcttctctgtatattttcatatgaccatatgccccgaagggcgaagggacatccttatagttcaatataacctgcattctgggcataattataccgcctacgggtttggaattgggcaaacttgaggaaggcaggtttgtatgttaacaagtgaggaaggagtgacaatacgttcaggaaagcctaataaaagtgagactaaactacaaactagtaagagaatatgaagatcaatatactaagaaagaaatagagggaaaaaacatggtatcttcagatctttgagcattttacaatcaagtatagtaaacgaaaaagaaaaggaaaatgctagatggcaccggagcctttgcatgcgccgagatatccaaaacgagaaaggccagcctggccgccaaacccaaatgcaaatgattgtatgaagcccaaaagtacaaaagtagtctatgcttaattttcaacagcgttacgccgaatcacccatttccagacaccgaaaatagagcagcagagttgagacgagggaatataggggcataatgaattaaacatgtccccgtcgatcggggaggagagaaaggagtagaatataagaaaggcgagatggagatgaactcagacgtgcgactgactgagactcgatctcgatctcgagcgctgagacaaggaccgacggccacggctggagggcgcgcggtccggcggagcatgctcgaagaacggaatcagatctgggttctgactcgggggtgtcttggagtcaggggagtactcgttcaggatacgatcatcagcagcggtgtctgggtggatctcaatgcctggctcgcgatcaaggccgctgtgagggcccccgttggttgggaaagtgacttgttcgggctcatcgtggcctcgctcgatcggagaccatccggcaatactgccggcaacgatacctgccatggcagcggcgggtccgaatgtcgagttcgagcgcgaccgtgtgttgcgtctggaacgagactctggggtggtcggctgtgggctgccgttgtcgttttcgtggtcattgtcgccattcggtgtgggtggcgtggaggaatcacgcgagcgggagccactgcgggaccgaggaaggaattcctgagggtgctgtagcttgtggcggaggtgtcgcagacggccaccgcggacgcgcttgaggaaggcgagctggtcgcggatctcttccagagcggggttccactcgtaattgcgatcctcgtctgagatgaccaatgcgggacccttgttgcgattccagaagtgaggaataagtctcgagatgaattcatccggaataagacgaatgatcacagcgatgggtatggagattgctccgagcacaagactcacggcccactgcgagccttcgttaagacgcttgacggagaaagcagcgccaccaaagaagatgatcaagatttgacccccaataatgatgatctgaataccaatgaaccaacggtttctcaaaataccttccaaaatgttgagcttgttgtcaatacgacgggagttgtactggttgaaaatctgcataaacacgaaagtgttgaagaccacggtctgcaaatggccgctatcccaagagaaaatcttatctccggcgaaattcagaacgaaagttacaaccagctggtagatggactgtccaatgatcatcttccacattgtcagagtgatgagtggatcggatttcgactcgggtctgcggtcaagcactgtttctgtaggagggtctgtcgccaaagcgagagcggcaaacgtgtccatgatcagattgacccacagcaactgcactgcgctgagcacggagtcctcattatcactagcgactgcagagacgaaggtcagaatgacggcggtgatgttgacagtgatttggaactgaaggaacttcttcacggcgtcacagacagtgcgaccccatgccatagccttgacaatcgatgagaagttgtcatccatgagaataatgtcggaggcctctttggcaacttcggtaccagtgatacccattgcaaaaccaacatcggcattcttgagggcaggggcgtcgttagtaccatctccagtgacagcaacagtctctccaagcttcttgagttgattgaccagaatcttcttatcttccgggctagagcgggcgatgacctggagtcttgggatgatttggttcatttgacgtgtgctcagcttgcggaatttgggtccctcaatggcgataccgccaggtgtgtagataccacactcctgggcaatagccttggcggtcataatgttatcaccagtcaccattctgacaaacactccagcacgttggcaagtatacactgcctcggcaacaccggctcggacaggatcctgaataccgaagattcccaacattgccatgtccttgaagataggttcgaagactgcctgggtatcatcggtttccgaagtaggggctccacgaggtggccattgatcgaagtcacggtaaaccagcgcaatgcatctgagagaacgagtggcgtaggtggtcataatgctgtccagtgcagtcctgttctcatcggtgacaggagtctccgacagagtgtcagtggggtcttggacgatacgagtcgacttgtgggatagaatttccgcggcacccttaactagcattcggtattttccattctccagctgcgtcacgactgccatgcatttgcggccagaatcgaacgggaacatctggacgaccttgccatttgctctcgcttcgccaaggggccccaatccaaggtaatccctagcgaaagtcaagagagcagtctctgtcttggatccgacgtacgtcttgactccatctgtctcaccttcaaatgcggttgagttgtagacaatggacttgaggaggacatccttcaccgacggtgatagggaagagacaaaatccgagggagtgatttcactctgatcatcgctcgagacaccagaatacttgccgaaccgagacgtggtacccaacgtcgcagccactgcagtcattttattctccgtcaaggttccagttttgtccgagcaaatcgtggtagcgttacccatagtctcgcaggctttgaggtagcgaaccaagttgttgtctttgagcattcgggttgtagcaaaggcgagagcgagcgtgacggccagtggtaggccttcgggtaccgcgacgacgacaattgtgacagcaacaatgaaaatctgcaggaatgcttgacccttggcgtccggaccacccgcgatgtccttaagacgaaccaaaaatttgatgaagagaaccacaaacagcaacaaaccagaagcgaggccgagcttggcaatgtactcggccaacttgttgagcttcgtctgcaaaggcgttgtttcgccctcctcttggagggacatcatcgtccggccgagggttgcgtgtgtaccggtagcagtgaccacgaacgtgccgacgccctcggagaccttggcaccagaaatgatgaaaggatccatcttcttcaggtcttcgttttgttccattgttttatacacttcatcgccgggggttttgcggagaacgtcagactcgccagtggccgaagattcgtcgcatttgaggtcgtaaccatcgatcaagatcccatcaactgggaccatatcaccgggttccaaaaacatcacatcgccaaccaagacgtcgtggacagaaatttcctcggttcggccggatcgttttaccttgacctgtcgattctctttctttttgttgagttttgcgaactgttgttccttttgccagtcattggctgcaccgaccaccaccacgataataatggccacgagaatggccaaaccttcgacccactcgacgccaggttcgtcgggatttgctgggtggagcgattgcggaattcccacagcaagtgaaactatagccgcaatggtcaataagatcaacaccttgtcgttgtaggcaatccatgccagctcccagatcgtcttcaatttcctctctggaagcctattatcgccgtagatacgtctgcgatcgacgaaattctctccgttgtgctgcgttatgacggaaccctcggtcgtgggtggcggtggtttagtcggagaggcagacttgggcatgttggttcccgaggcaggtgtggtgggtgtgaccacctcgtcaaagctgacagttccgtccaggtttgtctcatccacactcaagccactttttatatcagtccggagccctttttccagtcctcgcaggcctcccaacgcatggaaggcgccaaagctcttcggattgagaagcttgttcagctgaccaggggaaaaggcaaacttgttatcctcgacctcaaactcgtcttcgcggccggggtctggggacaggggatcctcatcgtgaacgccgtttgtggcgggacttttaggcgaatcggatgcggattcctgagatgatgagggcacatatgtgtcgccgccgtaggtgctcgatgtttggttggtctcctccgactccaacgagttgcctctcgagcgtgttccagggacggaaaggaagttggaatgtgtctcggccgccttcgtcttgggcgatgagatgttgtgaggtgaggttggccggctctctcggtcccgagcttcggaggatgcattggagcgaattgatgctgtggaatgcatatccgtagaagaggcactgccattgcgactgccattgcttagcagtgcggttgtatcgggggcatgtgcgttatcagtgtacatccgtgatcctcccgagcggatttgtaaaggcgtgtattcgttatccggggggttcacggccgaggtgtcgatagtaatagtcggcgcgcgctccctgcgcagggttgacgattggccgggctcatcttttgagcgtgggtcggacattatgggagtgtctattcaaggcgcgattcacgcgttggcacccgggtttgtatatggggtcatatggatcaggaggaataagtgtccagagaatgataataactccctaaactcctaaactcctaaactgtccagggttgaagatgaggtaagggtgggaaaagtgtgaaagtgtaaaaacaagcttggaagataggaggcaagcccaggtaataatcgcccccggacagacgtcaagtcaaacctctatccactccggtcgagaacttcctaatgcaattgatttactttcgttactccgtacggagtattggctttcttcttttttcttaacttctccactttgggggggagacccgctagcacagcccctactgtgattctgcagatgcgatgtagatatgtgatgtaccctacttgatatatgacctggacgtgctattgttcattgataagaaggcaggggaattctccatgacagtgagaatatttccaggacatttccatgggtaatcggattatgaaggagcaaataccgcagcgatgcaccaataccaagctatatagcgtctgcactgcctcatttgccaagacatgaaaacatgcccgaaatcccgattcggcaaattaggggggacggcgaaaataaaagaaaagaattcaaggcacgaacttggagaatctgcataactggagatcgagtgggaattaaaggaacagcatcgtacattaaagcccaaacatccctttatgtccgagctagttgtcttttaatatgcccttgccaaagtggtgacgtctcctatttatatgatcgacgtggactccgtaccggcacggagtccgactgtagcaggtccaagacttgttttcttttgttttgattgctgtacaatataaaatcaaactctgattcccggaacttgacggaccagatctccctaactggtttggccaagtacggacataacccgctattacagctcacaccacatacgccacactcagaccattgatccttgcatcgtacggcatatcaattgactactctgtatggagtctctgtatggagtctctgtatggagtatgaactatgaagtatggagtacgatgtactagattagctcgaggtacaaagcttagaactgtcacatggacataaagtaggtgtagctctgtaaatccgaatccggcatatagctacggagtacattatacaatatatacttcaataatttcccgtctccgagtaacacatagaacacatagttcagcaaaagataacaccgaatcagaaacccctaaaacaagccaaaccaacaattccaatcccaattccaatgccaacattcgccacctctcaaaccacaaaacccaatcaaacccagaagcctcaaaagttgggaaacatcccaaccaacaaatacggcctcaccgccgtcttgcccttacaacatgtacccagcaccaacctccccccacccgaccccatttaatatttccagtctccgcaaccccaatcgcagaaaccccactagcacaacgcatcaacgcccatacccatgcacgcacgcaccacccgaacagacataccactcacgagcatcccaattcaggctcgcaatcaaacgccaccggttcccgtttgaatcctgggtacttcgacgataagacattcctcctcgctggcttgttgcatgatattcggaccgccgaggctaatatcaccaggctgggctttgagtacctccgcggcgtgttggcattgcgtgtcttgcagaatggtacagagtccatcatagctccggtgcggtgatggccccgtgttaatgaatgggtgagtaaagcggacgctgtcattcgatactaggatttgtctctggtttgtaatatcatggctgtgggacggttgctgcagctagtacggagtaccgatctcggtatataaattcttgatgtttataggttgatgtttataactatctgtgagtatgtcaattctcatatctatgttaggtttcgaagcattgacctcactttatcttgaactttgacttgactttgaatctctgaatgttgtacgagatgtttctcaaacctaatttcctctgatatattgttgacaaacgatgttgatgcattcgtagatgtcctatcgacatgtagttgtagaaaaatgaagtaacctgtcccccttccatgttcgatccagtttccttcgtatcaagcctcgccgttaaaagactaaaaccactcaaatcccatgctaatgtacacagaacaaatcgccgctagatctactgctcccggtttacggacgacacgatcccaagtctcttcttttcttcttcggagatcgtcacatcccagatcttcaattcctggcccttttcgaaggtgttgtggtccattggggacttgcgctggctggagtcccggataaccaaggccttgctcgataaagcgagcgcgtccacaagctcggccatgcgtcgggactttgtaaaggcacgagtgatgtgctcgtagtttgcaacccagatagacacaatcatgcaggatgtcaataggtcgtgccgctcgagggcgtgactggcgtagtacaacgcgttatgccaatcgagaatcagctctggaatgtaggtcgtccgaatgtgttcgaagtctttttcttcctcggctatagaaccaattagtcttgagattccaatgccgtaacatcaagtacataccatcggtagatatgggtagccagtcttcggcgaccactgctccaacccattcctctagaatactgacgcattcgttcatgtcttgacccatgttctgcaaggtacccgagtcacgtcgacgtttggtcctaaattgattagctttggcaatgagatgaatagggaagggaaaactcacttggacatctgctcgtgcaccagtgcgaattgctccacggcatcaaacccaagagccagactctccagatctagaactctatgagccctgtagtatgccgaaactagtgcaacgttgttggagccggaaagacttgcggaaagacttcgccggtggagactgtttctctttgatttagtggggctagttggtgtagttgcctcggtctgtagcccttcttgtggaggcatggaaatgatgtcggatccgaatttgtcaatcgagatatcagccaaccgaatacggaaactcaactcgcgagcagcggcaagcttatcagcaactagtaaagtcagttcggttggattcaaacactaggaggaacaacaacatacggaagaacttgcgatacagccaggatccaagatcgcaaatcttatcccactgtccatctatgtagcgaagccactccagactgcgaatcatcctgtcatcttccggagcgacagagttcccaatcaagtcggtcttgggtgacactaatgtccgggaaccgtcaggtcgtcgcagcaccctcgaatagccagtgactcctctagaatgttcaatcgcagggacatgttctttcacccacgcccattgaacatcaagaacagtttccatgttaatatgatgtttccgtgcgagtcgaacttgttgtatcttctcttgtgggtcaacgatttcaataagaatcttagctagaatttcgtgtcccatctgtgcggggaggagagagacgtaaagtgggacaaggtggaatagacccctgtcttccaggttggcgatatgcccagccacgatcactgacgccgtttcaacgaaatgggaatccacgcgggcgtatcccctttcactagccacaacgtagacatgagctgcaatcctgagagcttcttcgtcatcggcagctatgaggaaagattcatctactggcttgcgcacaatctctggaatcacagaggtattcccgtatttatcggcgctgacttgagatacagcctgagcaagagcagtgaagaatgtatcgtagcctttgctaagaatcgtggcctggatgttgcggaacggattacgcgcttcgccgctaacccggtcgttgcccttgagatatacaaggaacttttgaagttctgcgtgcccagctggttccggcttgaatgccacaggggtattgggggagtggctgagtttccgctggaattgtttgcagaatccctggtagcgtgagagcacgacacggttgaagtacacgtaaaggaagtcgtcccagctccggcagacgctggctgcagcatcggtttcgccacaaagcagggcgtaaactgctcgttgaaattcatcggtattggggtcgcgtgttagcgcagagcaagcggtgcgccatgcatcttgggctcgactgttcatcaaacgcgtgtggccatcgtcagatgggtatcgagtacttgccgacttgggatccacactagagccgcacatgctgacggccctccatccttccagacgactctctgcccattcgcgaatcttagtccagttttcgccctgtctgagcatcttccagcatgttatccaggtggcgcgctcgaagaattcgtcctccttctctaaaccgtgcttctgacgagtgagagcatcgggatcgagctgagtgactagcggtttttgatcgcctttgctcagaagcgagcgcgagatgcccgggtcattgggttcgaggggctgtggccaggcgcgcagacgtttgtgacccttgatcgattctttggtataaagccaaccggttgtccacaacccttggccccttcgcgattgttcttccatttctgtgatcagggtgtcaaactgctggctttcggtcttagatgtctcttccaaccatcgcattgcaaccacgcactcaaggccatattggtcagcattaaggaactcttcccacatctcgcgatcggttgagtagcggtgaaggttctggaaagctgtctgtcgtcctgccttgtaactagcccggctagaggggtcgtcaatgctgatcaggttgagcaggaggcgccaagtgtcggcctcaagttgcaaccgccgtatctcctcgtagcttttgtgctcttgcgacccgcttgatcggaagcctgtctttgtccggtccacgatttgttgtgtctggatttccttgatcgcattgttcgcaatgtcgcgatagctctgtacaagcttgtaagctgcctgggcactgttgaaatcgtcggttgaattggcgcgcttgaactgatccagcttatcggcgaatgcttcgatctggcgagtgacgcggtccgctgtccggcgaagggggtgcagcgcctcctgggcgcctgccgcggtgaacagcggggtgtctgggacagagtttagtaaatgcgatctagacatagatcttgagctaaccttgagatttgcccgacacgccaaagacagacggctcatcagaaacatcggacccggtgtccgatacggtgtcgccctctgtatctccgtccatgtcctcatcttggtcttccgattggtcttccgactgatcttccgattgatcttctgattcttgttcctcatcctccaattcttcatcgtcatcgaaagattgttgcgaatcatcgtcaatagtgatgacctcagtttggcgctgggcaacctacacaaaggattagtacataaacaaatagccaagatcaaggataacgaactcaccggtgtgaatgacccggcggccgatcgagttaaaggcgccatgatgggagacttggttagaagggaggagagaggagctctgtggaataagttgtgtttgtctcttttggttttcgtgactgactaacccgaacgggactagcggcaacccccgaagctatttcaacgaattttcgcccgcgcacttctcttcttcttttcttttcttctctaatgtctataggctttcattagagtctcggtatgaaaactcaattttcgtacaggtccatgaggcctctttgcgtgctcacgattgtcttataataaatgcagttcttcaattagcctggtttcctccatatggaaactcagaccgcaaaggaattgtgacatcctccatcttcaacatgggtcacttgaaattgaaatttaaagaagcaaacgtaatagccttactactttacttccctgctgcctgagctcgttgcttcatcttcaacttcagcaagtttgctttcgggcagctgacggtagacgcttggtcaccttgctgttggtagaaggcattgcagcactcatataaagcatcaatttgtgcctggcatctgtcctcattgaaggagtttttctgcaagcagtctagcttggttagacctttgtgtcaacatgccatgaattggaaaaataccttgaatggcgcactgttagagagtcagtaagagctagtaacaccatccaggcactctaaatggacgctttcagatatgggcacatacagcacgcggatggcagggttgatcgtgcgacagatcttgctttaaattaccctaaaagaatctcagcatctagccaatatgtccacagtgatacttttcataccataatgcaagtatcaaagactgtactccgtacaaagcgttgtagatactgttccttggaagtgacgaaagtgatagaagagccaaacgcaaaatagattctccgccttcagaccgtggggcgagtgtgctattctgccgtcgccgctgatctctcttcttcctctcttttctaaccaccctttccacaaccttcactatcgcgcttctgggctttcgtcgtctaggtgagtaccccgtacttcagttgtgccctaaaattgcgttgaaatcgcatctaaccctcctttttgaactcttcagacataattcaaagccccgctcaaagaggtttctaaactcgctctcgctcctatcattgtaagcattcttcctcattgacattctggcttcataagaagtagccgttgaacgaaatccagactccgacagttattcatcatgtccgacaaagaaggcgctgctcctcccaccgagcacctgaacatcaaggtgaccgataacaacaacgaggtgttctttaagattaagcgcacaacgcagctgaaaaagctcatggacgccttctgcgagcgccagggcaagcaaatgtccactgttcggttccttttcgacggcaccagggttcgccccgaagattctcccgacactgtacggccattcccttctttcgtcatttattagtatctcgaaatcttgaaactaacttcaaatagctcgatatggcagatggtgataccttggaggtgcaccaagagcaaatcggaggaggttgctagacaacaagccttgtatgctagattcgcacttcccgacggaaccgaggctactggagcgacatacgttgggggatacgctagggctgctggctagcggtggacagaggatcctcattgacggcccatgggcgaagcggcggcgttcatactgctttttttcttatgaatgatgattatcaaaagcccttcagtcttctctgcagactttgagggtgctttcgctatgttatgttttcctcgaggtcgaccgaccgcatcgcgtagacataggtagtctcattttggtccgaggctttgtatttgaacctggaagcgagaaaccaggacttgtgccaaattatgaagactttcttctggggggggcctgtttcatccgttagtttaggtggtttatggggtctcaatttagactgcgcatacacttactaggccctgctatcaccagtgatcgccttataacgcggttaccaggcaatcgaatctagggcccaagaaccgcggagttgtccccccatgatcagttgatcgaccacatgtgttcttcgtgggatagaaagtgcaagataaccacacacaaagcaataaagagacgcccattcatcgcccatggtaatctgtcacacagagagaagacataaacaatccaattcaacaaatatacacatgcatagagagcaaatcgcctaatataaccccagaaatgcaccctaaagcgatctaactgctccaaatagaagccttcatcttctcctcctcctccttagccttagccttctcttcacgctctcgattccgcctccggatttcctgctccttaatcgagcggtcataagcgcgctgctgctctgtccgcttcggggcgcggatccccaacgcaccggcaatcaaccgctccgcaacggcagtctgcttctccggtcgacgggtcggggggcccttcgccgaagcaggagaagcagctctcgccgtccacgggttggaggtctgcggggagataggtgtcggcgggggacccagcggtccctcagcgctgatgcttggagagagcagctgggaagcgtattcgtcgcgggattcggcttcctcgctttccgaggcagagaggtctgcttcgtcttcccaggagtctgcgacgggtttgcggtgtattttagggttggacttgggctttgaggtcacggctgctgctggaagttttttcacgtttggtcgggagatgtctcgcaccgggcccttttcgcctatggacaggttgcggagtgtggattcgagttcggcgctggcgctggcgcttggatcagacattggcacgtgaggttcgggtgtaacgggcgataaatatacaaagagtgtagtggtaatggtcaacgagagtatttaatacacagtccaatttaaggaagatttgtgcaggctcgaaatagaacgaatggcgtcagtgccggtggcatccctggtcgatcgtggagaacaaagaagggctagacctttcgggttcggctgcctcaggatagtcaggcatcaatagagtcttttttctatttatatttcagggatagtagatcagttatattggattcgtaatgtctttggtggatttatcaagtacataatgctaacattcagcccctgacgttggaaacatccgaagctagcaaaagaaaccgacttatagatcatctaggagcatcaaactattgcaacctgcatcagaagaagttatagggtagtaggagtaataaagtgcacaataaacattgaagaagtgactagcatcattctagatacttcgatattctatctgccaatagatcctttctactcccatgtaccaaccatcttcgttctttcccaaaactgcacccgagcaaagtcactaaagtgaggccgttactcaagaaacgggtctggtgaaaagaagctggggttttccaagatcatatcaacgataccatcgggtcgtggccgagtactccccggtataacataacaaagaagtttgggacgtacggctgtaatgctaaaacgaggatctgagcacacccaatggactaggctataaaagaagaaagaaaatcacgataagctcggttgaaggtctctgcagtgtagtgttcaggtatacctcaactggcatctggcgggttgtgaataggaagtttaatagagtaatgagaatataacaacctactgacttcgagtgttttggaatttgactcgtaaattcaatgaaggtcaccgaccatggcttccatgcaaagccgatctgtggccgaaaaatttcggcaacagcggtctctcaaagaaaaatatatccaagaatgatgcatgtaaatctatgtctatatatatctttctttgacacacagtaacatcgagagagtaaagaaggtagtttttcttcgtgacatctatacggagtatctccgatcatatcaattgtcctctatgctagaatcatggttgaaatccgcgctgcagccaaatgtacggaggtgactcctcaatgtccagtcgagggcaccatctacggctacgcacctgatcttgtattcagcgttgagttctgtttgatattcggtgcttgttctctgatacaactcggccagatgatcagatggcggctttggtcttttagtattgccgtgattctcggttcttcgactgaagtgattggtaagtcaaattgaaactctatgagaatcactggagactgcccgggagaatactgataaaagaaacaggctattttggtcgtatattgttgaaccggaacccatattcatccgccggctttaagacgcagatttgcactttgacactggcacccgctttctggtcggcagctatatacctcacgctgaagcatgcagtgaacattctggggcaacaaaactccgcactgagggcgaagtggtatccctacctctttgtcacctgcgataccgtttcgttgattctccaaggcgctggtggtgggcttgcggcagcagctaaaacaaccaaagctagtgatatgggcagcaatgtcatgctggccgggattgtttggcaagtggtcaccttgacgatatttggggtgatgtcgggccactttcttctccgtataaagaacgccccaaaagatggattgacggttgaggcccgaaaagtctggaacagtcgcaatttctgggtattcttttggggtatctttgtggcattcataacaacttatgtccgttgtgtgtatcggtaagtcactggtgataatatcttgatatctgctgagtactgatattggagtgtctagcatcgcggaaatggctggtgggtggaaaaatcacataatgcagaacgaacttgattttactatccttgaatcgatgtaagtcgaactttgacaacacaaattggaagcatttgaaagctgatggatcctagaatgtgttcagtctctgtgatagccctatgtatcacccctcctgggtatttcttcccgcaaatgcgtggagattacactagattagtgaaagaagtggatgtgaaggaaatgaaggatgtgaaagatgtgaaggtctctatttcactgtggccagagccaccacgctatcaggaatttatttgattctggtgaagttacattatcttttggctagatggttgtatattaatgagtgagttgttttcaggatgatttcagatctagacatagaggtttagtggatgttgtttctcaagaggaatgagggaatatatatttataaatcgttgcattagattgaaaaagagatctatgctgatatattttatctagtatgaccatatacactttgaaaggcaaagcaactattgctccttagccaacgcgataaccttctttgcagcctcctcgaatccatcaaatgcatgcaaaggaaggccactctccgcaatctacggatattcaagttagcaactagacaatggcagcggatattcggatcatgcttaccatcttctgccccagttcctcattcgtacctcgcagtcgtacaaccactggaaccttcatattcaaatcccggaaagccaagataatgccctcagcaatcatgtcgcagcgagtcagtccgccaaagatattgacaaagacggctttgacgcgcgtgtcagagcaaattacgcggaatgacgccttgactgtctccgaagtagctttgccaccggtatcgaggaaattcgcgcagtggccgccgtggatagtgagagcgtcgaccgtgttcatggcaaggccggctccattgactgcgcgatattgtgagcgaatacccttttccgactaaggaatagactagaatacataccgagtgtgccaatattgccttcgccttccaatctgctgtatgtcagcaaagatacagacaaactagggagtcatggatgtgctactacatacttgacgtaaacaattccgtccttttcggcttcaacctccgccgcgacctcttcggatatatcccgcagtttatggatatcttcctgtcggcccgagctacggaatgcagcatcgtcgaagccaaaacgtgcaccctggacctccaaaacatcatcgggcgagatgccaatttgcgtctccagcgtgaaggcctctttttccttgtaaatttcccaaagggcttgcagaatgccttcaagctgcttgtgagcagaggctgggagacccaactgctcggcaacatcagcgatgacggagctttcgaacttgctctgagtgtaagggaatgggaatctttgcgactgagccgggctaaatccggaagtcgccgaggcaataatgcatggcgataaagctgttcggtcgactgcaatggaaacagaaacaggactatcagagttagaagccgactcgttgacagggacggatttctgcttgaggatgtcgaatgcctggaactgcttgatgtacagagtacgcttgtgttcagtgttccgtctcgaaattggcgtaactcgtctcatagtatgaaagccacgtttttgtgagccagttccagacattggctatgagtagttagtatagctcagattgggttctcaaagaaacaaactcacacggctagactggttcgcaaacaaagtcttcattccttcgccgaacttctcaggatggttaaccatgaccgcgccagcacgttcaagtgcccgatacttagtttctgcatctggttccccaggcgcagcccaagcaccggcatgtcccataacccgcccaggaggtgcttccaacccaccaacaagggccataataggcctacccaatatcagcattgcattcaaaccccgtcaacaagacacaacaacttacttaggatccacagtcctccgtcgataatccttaatccactccgcagcatccatctccgccgtccccccaatctccccaaccaaaataataccccgagtatcaggatcatcctcaaagagattaagggcatcgacaaagttcgtgcccgccagcacgtcaccgcccatgctaatacaaagactctgaccaagtccagcccgcgtcgtcgacgcaacagtctcatagctcaatgtcccagacttagccacgataccgacattgcccggcgcgaagcaaggcaatggctggaagccgattcggcatttgccgatggcggatataatgcctggacagtttgcgccgacaagacgggttttggattgcgtttgtagcatggagtggatctgtatgtaacacaatcaatgaaaagaactcttcgattactagcacggttcactgtgagtaggtcatacccgaaggatgtcgtggatcggcacatgctccgctacagccacgacaagtgggatttctgcttcgatggcttcttcgatagctttggcggtttggtttcccggtacatagatcgcagatgcgtcgggttttgcctgttcttgggcctggtgtgcttgctcgttagtcaaattacatccttcccaggagaacgtatcagttcaatcctcgtaccgctttgacagatgggaagacaggtaaacctagatgttcgccttcgacgccaggcttgacgcctcccacgatcttagtgccccattcaagagactccttggcattggcagtcgcctgtcttcctgtgcggagattagcattccatggacattcattgcgggactcggctcaattataacaaacggggataattacctgtaaatccctggtataataccttggtatgggtgccaatcttgaggttcggtaaagtgtccgcataactggccgtgcggggggtggttgtaaagcgccttattagggatgtccgcaactggggcgcccgtttatgtacggcgtgcagaggcatagcgttcatggaatacacatgcagattggcgcaatgcttctatagtcggaggaagattatatacaatgtcaacttcgaaatcaatcaagtcaagaaaggctactgagccaagtcggctataatccggtgtcggagctttccccacatttgccgaggaagttggccctttcaagcttttttatacttcgcgtcttcgcacatgagatggatatggggtaaatataaattcatacgtcgttttcgtctgattgaactacctagatacgactcctttctccaatcctgcacaatcaataatcattaagatgaagcttcttccccacaaatctccgcctaacagatttctccccgcgttgttcccgctccgcactgagacccttgagcgcatggagaagcataccagcatcgaagaaaccatctagtaagatataagttagcaaagagtcgcaatataagaaccagcaaccaatggtgcaaaagaggtaaaaacttacatcctcccataccatcatcctccatatagctactctcagcggcagaagtaggagtctcaacacccccacctcttacaagtcgaccgcgacgattcgtctccgcctgcaagatctctgcaaacgcctcggtctctctcgcccgactagtacgcggactcgtcgccttgcgattggtcgcgcgcagcaacttccgaatctcaaacagatacgtctcgagcgtgtgcatgagacgcgacgtttgtctgtgcttagagctcgcgcagatcgagatcgaatcgtccttgataatatagccaataccgaagccgtcggcggacgtagggccgaagccgaagtggcgcagacaagggtttccgcagttcgaggtcgacagtatagtggtattgatcttgtcccacccggcatcggcgaagattgcgggtgttggcgtcgttactgtgcggtagccgcgtgtactgcttccctgtgaggagaaaccgtcgtctgaaggggaggaggaggagagcttcggtgattcaggacactggctttgggtttgggattgtgtttcgccagggctggagtacccgccagttgagctggtgtccgggaagagaccctcgtcgaaggagcgctgccagaggcagtagagggcgtagaggtgacggtccgggccctggccctttgaacagtccttggtggcggcgctgtgtttttggcatgcgatgcggagggcatcgaccttttgttcggcggcattctcgccccagaatgcggtgacaaagtctatgcattctggacttacggtgcggatggcttctgtgcgtccgtgcaggaacatctttgtcatggctggttcgtaggtgttctcagctcggccgtagagaccgtagtaggcggcttggaaggccatctggatgaatgcatccggagagaagcccatcgaggtgatgaagttcttgccaaagcattcaaagtccaggacttggatttcgtgctggcagagcaggtcggatagatgtgattcggcgaagcggagcgcaatgttaagctcgggtgtcatgtcccattctaatttgcgcggtgtcgtgctgacatttccgaaactgtgtgggtcgcgcttcgcagggtcgggactgctggttgcccataggcttggggattgcccgttgatggtctttgcgaagcggaggatggtgtcggtgtacacgtcgctggcaaagcgtagcaccgtgtggccatccacaccggtatgctcgaaattgataccggcactgccgttcttgcagacgatgatttgcagcttgtcataccaacggttggtacaggttccaacctgcacacccttgacgacttcgcatgtgccacaaagcatgttagtacaaagatcggccatggaggctggctccgtggcgtctagacatagaatgaagagcgcggtatcgacaatgttcaaacactccgcgttgttagatctgcgatctttggtcatgatatcacgtaggcccgaccaaactttccggttctcggtgctgagtacacccacagcacccttggcagcctcgtgaagaggagtctgagtcgcatcctcaacgattacctccaggttaagcgagatatctttctcactcatgatcaaatcgctattgtcgtccaagacgtcaaaccagtagaactggccccgagccataacaactatgtgtttagccgtggggtcctggctaattacgcagccattttcggtaggcagacgtgcggttccaaaaagccgggagtactgatacatgcaaaggggcgttccccgcacggtatcaggaggcaactcctctcgacgcacagcccgaacaaacgccaatgatgagacggccagtgatgcagctcgagtcacctggtgatttctggcgggagttgggtcgtcctccaaaaggaagaatggattgaggtttaaaacaacagctgcgaatgttagatgactgcaaaaaattcttcacaggaaatccaacttacgattatcgaaattcaaataagaatcataccctagaaaatgatcagccaacatctcatccaatacttattctgaagacttacagaattgctcaatatagctcgtctttgaactagcataagccttcagccgctcttgcagaatagggccctcattctttaaaaagtcccgaacagcagccttggtatcttcatgatcacgcggggtttgcaagccctgcagagtctctaggtacctgcgacaggtattctccagatcaggaataggaagtttgggcagcgagtcctggtttgcaaaagtcaagccctggctcttgggctcagcaatctccgcggagggttgttcagaagagatatttgctctcatgactgtctggccctgggagtcaggcccggacttcttgcttttgccggtgtccatagaatcactggatggtttggggtcggcgtccgtaggatcaccaagtggtttgggatcggtgtccaaagaatcaccaagcggtttgggggctgtgaagaatcggactgccattgaggagtaagacataatgttagatgtgttcagattctcggaagataaaatcaggcgtagcgactagcgaggaaagtgggaattgacaggaggcgtaaggctgtgcggtagaagtagtggcagtcttggaggcagtaagatggcattggaactatgtcatgcgcagaacagatgcgggcaagggacaagaggacaaggagaagatcacgtagagggggagagattcaagtggcgagggagagggagagagtctggtaattttatataggcgtgcgggattatagaatcatctcgacgggctgtggatccacctcgggcctaaggggaaaaggaaaagaaacaccgactgagccatgtacttacagagcaatgtacgatagtgcaaatggtctgaaaccgaaatgcgggtttgtgtgaccgggtaatacggagggagagcggaatgatagcgccggagaaacggatgagttttctgctacgccgccagatgttaaattattgccaagaaaaggaccactgtggacaagtaggttatgggtgctacagagtccctttatatgggagactctgagagtttgtcccatgtagacatcgcatcttgaggcgtttccatggaggacggcgggtgagataggtttgtcttggggaggatacccctcaccccgtgggggaattcaaggggaaatgataggtgggatgcgggatagaccaggctaagaacttacttcccaaggttaatgtcaatcacgaaccctgcacgtcggcgcaggtgtctcggctcgggattaaagatgtacaaagcgtgccgttgagggtgagaggtttaaggtgaatagtgcttcaataaagataaaatgaattatcggcaagaagaagttcacttataccgccacagttcctcggacttttgaagtataccgaaagcgctcttttcttcatgtaccaatgacgtttcgggcgaagggaccggtcatgcgggggagtgggggtcacgtggacactacgtcatggggctaaaaagatcatcccagcgcatccaaaaggacatacaagagaacatacaacatacaagagaacatacaacatacaagagaaaattgggaaatcttacaatttcgtggatgggcatgttggaataacttcatgatacgctggggttgtacacagtacatcacgctcgaaaaataaaaagatgacgccagagattttgttatccacaggatgagccgcgacacaggagtggcggaagacaaggagtccaaaaatattcacaatggaacaataatatctgcattgccatgggtcctccaaaatagaaggacgaagcacgcttgcatacatacagtatgggtcaccgatcgaggcaggacatgcaaatgacgaagaaggtaaagacaagaagataaatacacaacacaaatcgaataggagacatattgttccgaagaacaggatggatttagatcaccacataagaatatcagatgtggcattctcaaatcaacacctccatatattccgagacgtttatgaagtgggcttcaagacgttgtcggcatactcgccggcgtagttaccaggggagccatagttgcagacagtgtaaggcgcggcgctgccaacattgcccaagtcagagcagctgacggtggcgcaaccaacttgagtggtagctttccagacgatctgagtgaagtggccccacttctcgaagttggtcatatcagggttggcctcaccgtagaggttggcgaagtatggcgcctcatcggtgtacatcattccgctgataatcttctcaccgacctctgccgcgtcgtaaccgtaggcgatgttctggccgtagtctccgctggcggacacgatggaactagtcacgttaggattattgtttctcaagcaaaacagaggaatacttacgtgtcgtgtccgtacacgcaacgagaggcgagggtgttggcagctccggcgaggtcatcggaccaggtcagatcgcctacagagtgcgcgctacggtggatgttgtggtagtacagaatggactcctggtaggagtcggtagagctggaggtggcagcagcggcggtggtcgaggttgccgaagaggtcgcgacggaggtggtagcagcggcggtggtggtcggggcgacggtggccggggcttccgaagaggtagcgacggaggtagccgaggaggtcacggccacgatttcagcctcagtagtcgaagatgggacgatcgaagaggtggtcgaagacgaggttgagctggtcgcgctactgggttccacagcctcaaccccggcggcagtagtagtcgaagccgcagcaggggcagactcgacctccttcctggaaacatcgacagtggggtgggcggcgttggcggtcttggtggactgcttgaccaaaacagcagtgttgagggtgctggtgctggtgggccactgggtgatggtttcggtgacggtggtggtagtccactgggtcacgtaaacctccttctcaataactctggcacaagtgccgaccgccaaggcggcaacgatgacagcagaacgcattgtaggatttcagacaaagaaacttctccaggaagtttgttaaaaaaaaataagggtcgggattgggtcaagcagatcgactgttgacaaaggagtgtgtaggtagaaaataaatgaatggcaggccgaggagcaccttctttcttcaaagagtgaaagaaagatcagatgcaggcttgagggattggatggagagaagagagaagaagcgaggaggttaaagtggtaaataatgtagaagggggagatgggagatgaggaggggggccgtgcgaatattaaatttaaatgaagtcctggagatggagattgaacttgtaagtgattattttataaattattatatcgtcaagaaaacgtcaatggctttctcctatacttattcccttttcttgggctttccaacctcttgagattcaaacatgcctcgatgtggcacattctatagtacattccacggcctagataccatttcacacagatatgaggctggcgatttagacctccaagagatattctccgtacaacataatctcgtttgaagtattaagggtatgagcatattaaaaattaaaattaagaattagggatatacgatgcgtgatgtgtcccctggaagtatggcctggaccacctctacaacaagtccaccgtatggagcccgtagtcagtactgctaatcagaagaagccctgagaaacaaggtaattaaaagtaccgtgggtttccactccatggaaaatctccgaagtaaactagaaacggagtctacagccgtgaaaaataagggcaagatcttagtatcgcaggcgacagccaacactggaagcccctggccaggaacggtttcaagtgtccacatcggagctttcaccaccaatcagaggaacgtgtcgagaaacaaacaaccccaccagaacacccgcttctcccactaagaaacttggcttggaggccaattcggcagtgagcacgggcggatctgacttagattaaagcaatcaacctcgtttcagccactcaattatgacgagaaggatcgcccgagacactccggagcaaaatgggaattccttgtttttgattatatgtccaagttggagggcatctgtgtagcttttgatattccgaggttccaggccgatggagcactccgttccttggatctgcgacaagtggaagatcatgcgacagccaatcagagcgatatgcccgttggcacacctcgtccacggatccttgtgggactgggcgcgtatacatacaggaaggggaaattccaaaacatcgtattttcaaatctgtacaatcgcatttggccttgtaggagtacggagtagaccactacagaatattccgcagattctagtcttgaacatgtacctccacctttccggcagcagggtccatagtctgaaagtacagaacatccgctctgaaataacgtaaattgtaaaacgtgcaagagttacccaaccaaatgtccaaaaacgccacacaacactcctgatgtaattcaaaaaagtaagtaccaaactcgtagcgctcgctagagatttttagtttggcatttcccagtctcacaaatcatcatgtagttcttggctggctcgccggccttcaaatcttggaagagagcatttcgggatttgagccagaaggacaggtttcccacaaagtctttcagatgtgaggggcgaatgtcgacaagcgaagtgaccacgacagacgaggacacggccacgccggcctcggcccggacacgtcgctggatcaggtcgagtgctgacacgggctcatcgttccgactgaggaaattgtcgccacgtggcttagggaccgaagagacatcgggcgtggagaacacacccgtcactgtgcgagtgccaatctggaggcccacaatcacgtccagcatgcctacaaacaggaaggggtgctggatgatctccaccgcgaaggtgttgcacgtctgccgagccagggtccggtaactctcatccgcgagaagagcggacaggcgcagtagattacgcgcaatgactccgttgatcgaaggtgttgctgactcggtgccagttttgagacggaggatcggggcaggcatgccaggggtgacgacggaaggtgtactgaagtatccggtagctgtagagccactctcatccaagaagtattcattgaggtatcctagaatcacaagttagccacaaggtcccgttcatagaaatggggctattctcactttgcaatcgctccgcaaattgaagatagctgtcgtcgtaagtagcctcatacatatcaagcaatccgctagccaagtatgcgtagtcgtcggcaaaacccggggtgtctccacgacttccatcgcggtaaatgcgccatagctgtcccgtgcctttatcgaagagcttgtccttgatgaaactgattgcccgtgctgccgcttcgcgacaatgcacggccttggagctctcgatctcctcaaacagaacactacacttggcaagcgcaccgatcgccaatccattccaggccacaataatcttgtcatccaggtctggccgcccgcgtgttcgttcgcgataatcgtgcaacttcagctttgacgacttgatgatcttcactacttcttcctcgctaagaccgaagtctctagcgagtttgctcggcgtggcacggacggacaacacgttctggttcatgaactcatcgtgagggtcatactcggggggcacgttgccgtcagggagaacaccccagtgtttggcgcagactggagcatcccgagggccgaggactgaggtgagttccttcagcgaccagacataaaaggcaccctctcgcttttcggtgtcatttggatgggggtaactgtcggcatcttccgaggaaaagaaccctccggtgggcgactgtatcggggcgctcgtcaagtaggcggacaaatcatagacagcgcctaaaagttcggggtcgtgagtaagccggaaagcatccacgtagacatccaacagctgtgcctggtcatacagcatcttctcgaaatgagggagaccccagtccatcgtcacgctgtaccgtgcgaatccatggccgatatggtccctaatgccgccacgagccatgttcactagcgtcgtgacagccatcgcggttgcttgttcacactcatcatgccctacaacatccgtgacctgggtcggataggcaccgagccggattaggaagctgaggttagagggtgtaggaaatttcggtgcgcggccaaagccgccattgaccgagtcgtatcgagaggcgaaatgctgatacgcttcttctagaagctcaatatccatttcctcgtcattatcattatcgcggtcaccatgtgtcccttcctcggcaaactctttcaactgcttggtgatttctttggcgctgtcgagacaacgctgctgttgtgtctgccacacatctctcaatttttctaaaatctccacaaacccgattgcctcggggcccgtgaatgtgtttgaatttgggccttgccagtaagtgccaccaaacacgggctcaaggttaggagtcaaaaacacattcaagggccagccaccagaacccgtcgtggcctggacataattcatgtaaacgtcgtcgatgtctggtcgctcttcgcgatcaaccttgatcgggacgaaggattcgttcagaatcgaggccacctctggtgacataaacgattctctttccatgacatggcaccctaggcaatattagaatgccggtacgcccagtgaaatagttgtaacctacaatgacatgcggagtaaccgatactgagaaagattaaacgattgtgcttcttggcaagctccatagcttttgcatcccagacttgccatgctaccgggttgttcatatgtcctcggacctgttattccatgagcgtgttgccatttatctcataggaacacatctctcacatagggggatttgctttgctgcagacgattgaccattttggagcttgtgtcaggtacgtcatggcgcgggtgtgagtggttgatcgaggcagccattgtcactggatttccaatacttctgctgatcggagactagacgtccatcagcccggggctgaatagtggttattaacgggttctggcagtacctaggtacccaagtttagaagctacccaacgtgggatcgagtcctgatgggatataacggcttgtggcacaaatagtatcttttaaactagggtgagaaatgggccgggttggcgcgggttagagcaggtcggagcgtgtcttgatggataaagtcgtgtgcgggcgcgccatttaggcgggggagtcgaggcaagggtcgcggtcgcgggagatcggccccgtgcgtcatggctgcatcagcaagtcacgtgatctggttgtatagtctacaacatatgtacatgtttagtgtactgtttggtgtggtatttaaggcaccatacatgtctctgctaagtatacatatgttcaaaacataattgggtatcacatcatctaatcgtctcccattagctctgccaactctgcctcttcctctgccgttagcatggattcggctggtttttcctcttcctctttgtctgctgcgggcttctttgcgagttccacggcctgctgaagctcatcgggtcgaagggaccattggcgaatggtcgcatcaattcctacgctgacaatggttgaacctacaagcacaagcccagtgacctcttcgaagtggccagagaaagtatgatgcagtgctccggtctatattaatcagcacatacgcataaaaaaaccaaggaggaaagaggtccttaccgatcggttccacactctaacttcctcgtcccgacaggcagtcacaacccagcctcctgcttcatagacaacaacatcacggacaaagtcaggatgctctagggtcagattggccttccagccatcctctcgaatcaagcatttggcagtcttgtcagccgaagcagtccagagatcaccgtcattatcgaaaaagagcttgtagacactggtctcatgtggaaggagagggtcagtagtatcaccaccgccaaagatactgaattggcgaatctcccggtcacttcctgcactaaatacgattggtttggtgctatccgattctgggtcaagggcaaggtcctggatgctgcgagagtggcccttgaaggtctctaaccgctctccacttgtgatattgaacaccaggacttgtgcatcagcaccaccggagatgagcaggtcctttccaagtaaccttgcacttatgactgattgaacaaagtcgacatggccttcgtacttctgacgtggttggcccgtggccgtatcccagctccagatagcttggtcccagcacccggcaaataggagcttgccatcggggctcaaacaaagacaagtaacaggagccatgggacctgtaaataccttagctgtttcgcctgtctgtagaaatgtaagaatttgcgacggttttgagataacaggtgcacttacggcaaggatgacccttctcacagtgccactgctttgcgcaacataaatcgagccagtatgccagggatctggatgaactgctaggatcttgccctgcagtcgaatagggtttccattggtgttctgagacttggcatctttccgctcctgctcatccaaagacgcgctgtgagggacgtcaatcaacacattccgattcaaagatcaaacaattgctttgactcacgatgtctgaaagaaatgatcccggttcgaagaggtcgtcatcgtgtctccagtctctcaaaaattcaggcaaacgtaacagcagctctcatttttccccatcaacttctcccccgccaacttcaaaattgctatccgagcttacgtcgtccaccgtagcccgtatcctccacaaaaccacagaatttgcgtttcctctcccttcccttctcttcccaacctatctcgtctctccaaatctatccgttttcgtattctttctcttcgtatccctcgtttacttagtccgcgcgatatcgcgcacagctgccatggaaatgaatcacctcatagggtcagtctgaaccggttcggagtcaaggtggccgggagttaacatttggcagtcagcgtttcaacctgatctcgaaaagtgacattcggtgagtttatcagactgtcaattgtcttctccgccattaattgtcttttagttatgtcggtactcttcacgaaatcaaccccgaagcctccacgatagctcttgagaatgtcatgtcattcggttcagaagggcgccgcggcaaccccgccgaggaagttcccccctccaccagtgtttacgagtacatcgtctttcgaggaagtgatgtgaaggacatcagcattgctggggaggatcaaaaggagcccgcaccgcaagaagcacctcgggtacccgatgaccctgccattctcggggtaagtcatcacagctctttccttgatctacaacgtcatcccccacaacccaccgcacattgtctcggcgaattgatcaagtgacgagaaattctcggatgtaaacacatatctgtctgaatgcgcaaaaccatgttgagatttccgttgccttccttctgatgatcaattccccttggacttgttttctgtatcgttttgtatacagcgtgctgactagcacaaatagggcgcgaaacgaccagttcctacccaagggcctgacccgggacttgctccacagactcttcctccccagggccctccccagctgccccagggagctggcccaagccctcccggttaccccccgcagcaccaattccagcaaggtttctaccccccctacggacagcgatttggaccacctcctccgttccctcccggtcccggtttccccccgtatggtgctcctcccggatggtacccgcctccggggcatggattcccccccggtcctggtcaattccagccgccgatgcccattggccctggtcagcaacctggacctccacagcttggacctcagcagcatggttctcagcgcccgggacctcccggtgccgcacccgcatctaagcctacatctgaactcccgatcggggacaagcttcccagcaagtctacgagcggtaacgcaaccccagccgctcagaacgcccccactcctccaaacgactcgaagcctagtgtggccgaagctttgcaggttcctgttagtgctgctcctgtccctcagaagaatggccgagttatgccagctatcccaatcgctgccccaaggcctgctcctccgatcgccaacattcctatcgccgctcggggaaataaccagtctatcactgatgccaccgcggctgccaccgctgccgttgctgccgccatggccaagttgcctcagcctggtgctcaaaagcaaccaggacaggccgaaggtgccgtggatgcgcttacgcagcagatgaatcacatgcgcccttacgacaacacccgtcctccccgaggtggtcaccaccaccctcgcggtggtcgcggcggcgcgcgtcctccgcagcagagcaagaaaatcgaagtcccccaatcggattacgatttccaaactgcaaacgccaagttcaacaagcaggatttggtgaaggaggccattgccactggagttcccgttgctgaagccgaggtccatgcagccgaggaggcagaatccatggaaactatgtcaaacggcggcggctcttcggcccacggctacaaccgcggttcttcctttttcgacaatatctcaagtgaggctcgcgatcgtgaggagaacaccactcgtgttggtggtcgtgagtggcgcggcgaggaggagaaacgcaatatggaaaccttcggacagggtagtgttgatggctaccggcccaactaccgcgggcgcggccgnnnnnnnnnnnnnnnnnnnnnnnnnnnnnnnnnnnnnnnnnnnnnnnnnnnnnnnnnnnnnnnnnnnnnnnnnnnnnnnnnnnnnnnnnnnnnnnnnnnnnnnnnnnnnnnnnnnnnnnnnnnnnnnnnnnnnnnnnnnnagggtagtgttgatggctaccggcccaactaccgcggtcgtggccgtggccgcggctttggtcgtggtcgaggtggttacagccgtggctacggccgtggccgcggtggccgggtcacctctgagtccactggtgtcccatcccagggttgatcgggatttttttgattacatgtctttctagcgatgattgctatcttgttttcatatttggggtggcaagacctatgaccgaaacgaataatcacacttgaatcttttctagtctcttcggcgcaaggcagactggggccgggggcatattgggttggccatgcgatcctgcaacagcaatgtttctttgtgtttctttgtgttttattgttatgttcctttttttttttttttttttttttccatctgccacgcataccctttctgcggcgtcttctgaaattcctggatccggtcgaatcttctctcatgttttcactgtgcagaaagtggcgaatgcaccatgatatctcgtgctcgcccgcatggagcagagatcgttttttttttgtaaatcatctgggaggaaatttccccaatgacctaaatgaaaaggcaaaaaacgaggccgaatggccttccaatctgtttcttccttgtgtatctattctaaagcggtttaatccgcatctcatcgaggcctgagaccccagaaagtagcttaatccggtagtaagttgtatacatcaacatttccacacgtctgtgagcaccagaatttgtcatatctctctcattttgtacatatttatacatatcctggttgtgagctctcttctccgatcttgatacatcatatatcgcacttaccttgaactgaccgcttcttatagattgctaacccagagagcaaccttggaagagtacaccatccacactgagacagctccaatttcgaccattcaaagaacaattggaaaccttccgacattctctacccatgtcccttgcttccattatagattcgccccgccgccatgtgtgtaacacgtagatttcctgtccaggcagtcactgttcagagccggggtttcttgttccttcgttgtagacccaatatatatatctatcgtccatggcgtcccgcagtcttttccagactatctgttatatcaagttacatcaaagacaactccatgtcgtcttccactcaggttgccaacaagttaccctgggatcctaacagtaccaagttcccttcgcggaaagatcttccaaagcttccagatgcacctgatggcgccgcttgggtctggggcaatgatgatgaggtggatactgtcatttatgtcgatatgttctattttatgtcgctgatccatcagatgtataggtgggcagattaaatctcctgacgccgcagcgggtcaaggcatctgctgctgagattgatactggagagatggtgcgactggagtaagtcgagtgaactataagattgaactccgcttacaggtatgaatatcaagccttcctctcacagtacccgagaagccggcttttgaccgcgagatcttgcagcataatatcaaaacgcttgttgatggcattgcctatgatgatacttatatcatgaacacccagagcgggacgcagtgggatgggttccggcatgtaagtgattataaccaccaaacgaaaccttggtctaatacgtccatagttcgcccacattgacagcaagtgcttctacaatggggtatgcaccgaactcgattttccatctcccggaactaatccatcaacacccagaccaaaagcagtgactttgtaggcgacactgtaaacctccgctgcagcatccaccattgggcaatgcacggaattgccggtcgaggaatcctccttgactactaccactacgcgaaaacacataacaagccctacgacccctatacaacacacagcatcaccctatcagagctacaagcatgcgcgatctcacaaggcttagatctacgcccaaagtccgaaggcggcgacatccgcatcggagacattctactcgtacgctccggcttcgtggagcggtactacgagctcaatcctgagcagagatatgcagctgcgacacgctcccacgatgacctgtgctttgcgggactctcgcgcgagtccgctatccgggactggctgcatgattgttattttgcggccgtggcgggcgattcgccgacgtttgagtcgtggcctgttcctgaacatgactatttgcatcagagcttgctggcgctatgggggtgtcctataggggagatgtgggatttggaattgctcgctgagaaatgtcgggccagggggaagtggtctttctttatgactagtgctccggccaatatgcctggtatgtattttgcttgtgggccttgcggctgggtttatgttgggtgtatgagctatgctaactaacgggttgataggtggagttggttcccatgcgaatgccaccgctattctttaggggttttgcggtgtatcgagggtgttaattagtggttgtcaatgcaacgcgacgctacttcgaaccagcttctctattcagctgttgaagacgaactatctatgacaagtctacagtatggaatataatcatccatatcaggtacagcgtcatacataaaagattcatacgaatcatctacctaaaactactaaaaagactaccatcatgtcgtcctcaacgacagaggcagccgactgttcttgttaaagtatacgataatgggcataacgaaacccagcaccctacggtttgtcacttgccaatctttcataagcagtggccagaatatacggcctcataatttcactactgattataactgggacagcattctacatacacacaggagcaggttatttcctaatcttgccccatgacattgttatttcttttcttcctcctttgccgacttccaccctccccctattgctttcgagcggcctgtgtaggcttttgccctatgacaagatagaaatatgaataaagccgcagatccttttgttgtaattcctcctgcacccgactaatcagggcatcagtgtcttcctttgaccagcccaatgtcctggtgaatagacggagcgtatatccttccagcgcgcactgcatctggtacacatagaaactcccaattcttttcagatttaggtcgtcactccacttgccaaagggaacctagttgcaggcactccaaattcagccgcttaggctacaatacgcacaatgattatctttgatttttgttccattttaggctcacctaccttgaatatctgttcatcgacttgcacaaagccagctgagtgcatcagctccttctgctcgactgctacgttgattcgcttgtcaaacttggtcgccgcctcgtgtatcagcgcctcccactcccttagtgccactagccgggcttcatcctgtgcgttatcggtaaagaagtgcaagtcattctcccacacttctaaccaccccccggggagaagatgccggaacgcgttagcgtaggacctatcatagtcggtaatcatcccgcctagcgactgcgcatgaatcagatgaaacgcctgttttgtagtgaacggccaatcgccctcaagctcgtggcgttcaagatacgggagatttggagacatatcggtcaggtccatacccgttaagcgcggggcaggacgatgctggtccagcgccatgatcgtccaggagccgctacgggtagcgaactcgagaaacttatggtttttcttggccggatctaggggggcaataaaggttctgccgtctagaagatgccagatggtgctgatcatcgcgtgtgctgtggtagcgttttcgtcgtctggaaaggggaattcgggcttgaagccataatagcggcgtccattttcgtatgtgtggttattgcgtgcagtcagccagttcgattccatttttcttcggtcagctacctttccttttctcgtgggtagagatcgggggagtagtagtttatatatactcctctctgctacagtgaagagcaacacatagattgtcccagtcgatttctaacggtcttgagtcatcaggcgtcttgagatctgaatcccacgattttgcgggccttggagttgtggggtgtgggggacgctagtgggcggtctaatggcctggcaggtcttgagacggcggaatccggggttgtcgtttcttgtttccttcaaaggtgaaatttcatcttccggtctttcgcaaggcaccagattatcagttccaccatgagcacccagacgcaaatagagacaatcgtgctacagacaagagcttccaccgaaacaatcccagccgagaatgaaacattccaagactcaagatcccccgaaccaaaatggatgtatgccaaaatcctcagcgcggggttgtccttcttcgtcgcgggggtcaacgatggaagtctaggatcgatcattccctacgtgatacgcacctacgatatcggaacaaacatggtagccgtcctgtaagtacgaagcgcagaccaaggatatccatctgcaatacaacactaacatatccagatatggcacaaccttcttcggctggctagtcgctgccctaagcaacggcaaaataacccaatacctagacctaggcccaattctgagcctaggcgccaccatccaagtcctagcccaagttctgcgcgtctgggaacccccattcgcactgtacgtggtaacattcttcctcgccagcttgggtcaagcatacaacgacacacacgctaataccttcgtctcggcgctgagcggcgcgcaccgctggcttggctttatccacgctatgtacatggccgggtgtttggttggccctttcgtagcgacgggcgtggcgtccgctaatgtcgattcgaagtggtatctgttctatcttttcccgcttggcgtgggtgtggtgaatcttgcgtttgtgggtgtttcgttccgggatcgtatggctacgccgactgtcttgaggagtgagcgaggaggtagaattgcttcgaattctgcgctcaaggagatcaaggatacgctttctacccctggggtttggctgctgagtttgttcttttttttctttcttggggctactatcaccgctggaggtttgtcttctcttgcttgcttctctgcgtgttctgtgttctgtaaaactgattgtatcaggctggatggtcgagtaccttgtcaacgtccgcaacggcgacgtcaaagcaatgggttatatcccagccggcttctacggcggcgcctttctaggacgtcttatcctcgctgagcctacgcatagactcggcgagcgacgaatgatctttttttacgctttgctatgtgtgggtttgcagttggtattctggctgtgagtttggcactcctctatgatatatttctaccaaccccgatatactgcattgtctgtactaatcctggtggtttaccagcgtcccgaatatcatcaccgaggcagtagcagtcagtctattgggattcttctctggtcctttcttcgcaacagtaagtgtttatcactgaattttcctgatcccaccctaacatctagcttagggtatatcggtcggctcaaagatcttctcgccacagatccgctcttcggcaatcggtaagcgaacagccttgcccattattcgcgggggtttactaataatccattaagcattcgtcttcgtcctcggtcaaatcggtggatcggtctttcccgctttgacgggaattatcgcgggacaggttggtgtccaggtcctgcagcctatgcttgttgggttgctaggtgccgctggtgtgagctggttaatcttgcctaaggatactgcgttgcatcaagattgaggggattataaaatgagcttcgtggtattcggcgggggtgaacaggacagctttcaaagattaaacaaaccaaggaactagggtataaacattcattacttcgttacatcacgacgaccaatagtgccagaagccagaatcatcaaccagaaagaaacccaatgagatacacacattcccacaattataaagaccaattactcaacataagaaaccccataagcatcattcctcataaggaaataaatggaacccaaagcccttagaagatatcatcgggccattggtaatcctcaaggccagaaatcatagaacccacagtagaaggtgacgtagaaaacacaggggcagacacaggtctctttttggctggcttattcactttgactttgactttggcagcactcgagcgaagttcttcagggaggggcggtacgggaggaatatcatcgtcacggggatatccagatcgtctccgactaggacttgtcttcgaccgcgtcggggtgtgagggctacgatcagggttgagctggcgttgtgggtggtgatagaaggcttcacggtgggagtcacttggcggagcaggaagaggcgtagaccagatggtggagcgggaatcgtcgtccgagacagcggcaggcgaagataccgggcgcagactgggctgactcttcttcatgcggataggggttgtgggcttggaacttggtgagcgggtggttccggggacttttcggggttgaacgtagggagaccttttgatgttgctcgtggcacttgtatttcctcctgcattactttcttcggtttcggtcgagggggctgcgtggttgatggcttgcttgcgcttggccgatccagggctctcgccggcctcggatttcggccatttcggttttccggatggactcagtagaccggagtcaatcagcatggcgagatcggggtcgtcgatgcccttcttcggacagggccgaggagggctcccactatcgatagattcaggaatggaagacttccgtttacgggagcggtccttacccattgacgccggctgtgtcccttttgagcgccattttggactttgagctttagccgggctttgaggggatcttggttcttcgaaggagaaattttcacggtcttcaatggatgacagggccgtcagattggccgcttcagatccagacgccttgttttctgcggcttgttgatccagaagcctttcagacggtagagagggaagggcaccagggacgaacttccttgggaacaatgcgggatccatctcggcattgggaatatttgcttgggctgtaggtactggggcccgctcctcgttgcctgtgagttcacgaagctcccgccgggcacgttgcagtttctcctcgaggttgctaactttcttgagcagcttggtttggcgcgagagttccctgcgggagggttgcttgcgcagtccagtcggctcgtattcatcggaagttctatcgcaatacactgccggggaagcagatggggatttgaagaatgacttcgtcaggcgaagatcttgaagggaggagcgtttggaagctgaagactcagaacgtgatggcgcaccacggttttcttcaattgggtggtgatacgggtctttgactggagagctgtattccatcttgtgctggatcgaccgccaagtctggtcggcgagagcagtgttgacaccaagatcctcagtgtaatgacccttattggttccctggtagccagccttctttaattccgcataggccttctccgcctggctaatgacatccttctgcggcgacttattcggcgatccctcagagtttctgccccatccaccgaagggattaaatgccgaggcaatagccttcccaaaacgaaaaatcccagatgagcggtgctgaatgccagcctgtttgttttcctggaggtagatactgggcggcttttcgctgacactatcactcatagtcgcttcaatgaatcgcgatgtccgtcctctgggacggcgcgggctggaagcagatgccgcggcatgacgagcgcgcagcgaagccagcgagccacgaggtgaagcgcggggcgaaaccttgtagcctgcgccattcgcgctcacgttgagactcccgttttcaccgcgttgggtgcggcgctcatgggatccgtaatcagcggcttcttcgggcaacggccagtcgttcgagcgacgtcgtttgctcagcttcgctgccggcgatcggtggccgtctgcatctgcttgcgcctcttcggcatcgtcgaattgtccagagatatctgagctccaatccgagtcatcgtcgtcgctggatcgtaggtgcttgcgggaggagcgctggtgtgcggggcttgggtcgatgtctatctccatttccattttggagtcgcgggcgctgaaatgacgcagggaggttagattcggtctgtcttatgcgggctttgagcttcctttaagttggattatgagaagggaccttacctttgcagcttgcgttatccttttttccccacgcccttggaaagatgtcgcaaaagtctgtcagaagttggcatagaaatggagtcgagtgctgagagggaagaaataaaggtaagaaatgaggatcgaaatgaagatctcgggagactcgagcaaaggtgatgcgccggtttgtttacatactccgcacttgccaagggggaggtttgttgtggtacctggtacctgtgtctacccctaatctatcgcaatccacaaagtacccaatacttcaagaatgtcccatatccccaaaacaaacactacaaatatgtatatctgtatgaactcgatgctatgtagaattccgcgtgtctcagacatgtgtatgttcgataggaatgtagatatgatatgtcacttagagatatgtatagttaggacagataacgcttgctaaataatggatgcacatgcattctgatgaattggtgcaattcgtagattgaagtaaaaagaacgtcagaatgctaaatgtaggtataaggagatgctacaacaccagtataaagagtagattcaccagatgtgaagtataaaacccatgagaccagcccttgtctgtccggaaagagtatgttccaagagcaatgttgaagaaaatcccagctacagtgagataagagtgacattccctgttccgatcccatcggatgaaaggaacgaggcgcgttgctcttgatgatatagtgaggtaattcgcgaatgatcattgccgctgagagtaagaagagccagctgcccttcctatgcaactccgaattttggccaaacaaatgtctcgcaaagtagtggaacatgaaagaggaaaccagttccccaagagatgagtccaaatgcataaataaatctagggctcgagtagcctcaatgaggaaccagaagataagttatatacaaaaaaaatgcaatcggacccattgacgggttcaagactcgtcgaggcaagcccaaggaaagtatatcgtgttcagccaatatggcaagatattttgaactcattttagatcttattaactcgatggaggagctttcatgaccattttgccgttggcacgcttgtacgccaactcaatgcccatttccgccataagtgcagcgcgactttctcctgagaaatcgcgataacccggataaggctcggtgtcaggccgcatgccattctgcattgatcgttcatcaaggccgaaagtatcttcatggctccttttgccgtaagttggcccagtttggtacaccatacgcttccccctaacgttgtcatacccaccgccgctaccgccgggtgaagtgctttccacagaaggaacaatgtggtttgcatattcatttggtaagggcttgagagacggggtggcctggaccaaggtcggtgtttgaggacgtgacaccggaatatgggacatgtattggtataaagctggttcagccatgcggggatccatgtatgaggtcgcttttggtggctccatgccataagaattcatacctgacatggagtaagctcctcgttccgagggtatttgaggtgccggatacgcaatgggcgttccttcgtattcggatgcattggatgggtgtcttatctgggcatatgcgttctgtggggagtagataccttgcgataccactggtgggggtgtaggaggcatgtgaggagccggataatgcgaaggcgtggagccaaatgaaaggtgtgattggtatgagggtgtttgagagtgtgtcatagggggtgcaggtggcatgggtctttggtagggttgcgggcactggaagccatagtcgggtgcagatggtcgtcgatctggaggaacgaacccgtagggcgattcgatattgctgccattgctgttcgacctagggcgatctatcgaagctgcgtatctgtcgggtgtcgcgaaacgatccgacgatcttgcatacgccgctgcgcgttcctcgccgaattcataatcctcatctcgcttgtcgccccggcgcctcattcgaacatcacgacgaatgcgaacacggcaaccctgctccgcaatgatacggctcagagatgtgctggtcgctaggccggggaatttcttagcgctataaacggtaaagggtaccgacttgacggaaatgaagaaacgcgtgcggggtgcccggctttgctgcagcggaaagaggtatttggttgggaagaggcaaggcggaatccttgtcggtatccttggggtccttgatttcttcgtacaggtggaagcttaagcggtaccggccctcatggcgcactgacaggtctgggaagatgaaatagcctgcttgtgaagggcggtcgagatatgctaccccggcgactggcacaccagtcaatacagggcacgactgtggtccacccacccgcccgtgggccataggacgtgcggtgtcaagggttgcgtagaggaagaaattggcattgtaggcgaaggtgatatcggtcttttgtgcgtcgttagccgggtcggactcgaagatgcgtaactcaaccacaggcggtgggtcaacagggcgacggtcggctgatgctatttaggatggtcagtcaacgcgcggccctgatcaggctcaacggcaaatactgacactttgctcctgcgccgcatgctcttgcccgctctggttgttgcatcacgctcaatttgtatgtaagctgtttgccctcccgcgtgatccgggtgactgagtgctccgtctcattatgaggtgccatgatgggtggtctgttggccatttttgcggattgatattatcgttgctagatattctgccggtcgcaatatcagtaaatgtcgatcgcatggttgggggttcgtcctatgtcaatttttccatggagcgcaacatacaatccgtaatcaatggggccttggacgaggtggtttaaggtgggatatcgccttcttctcccccagttcctggcctcacatgagctgttggaaagacttccgaggttgcagtcaagccgataaaaccccccacatacaggaacagaacaaaaactagtccccgatgaattcgggaaaatgcacttcaaataaacaagtgatggaagagtagaggagaagagagggggcagagtgggaattggtgacactaacaagaccccgagccctgggccctctcagtatcaacagaagtacctgttcgatccgcagtggtccccgtaaaccccgtgtggttcccttaatttttttttttttctagtttctattgttctcgataatccctattattttggaagaaaaaacagacaccaaatagatatatactctaagcatgtcatatatgtgtgttacattcaaatctacgagagtcgtgtctttagggctttgaataatacttccaggtaattaataatcatcgaatttgatcccaaaaaaggcaaaatgactggtaaactatttatttctcgatttattttccatggaacgacctctccacgttacccggcgtctatattccgttccaaggttccggccgcaacccagtccaacggatcggagtctctttattttccctggtctccataacgtcctatgcttatattgtagtctacatcattctatggatgagcttgttcaaacaaatatggcggttttaaaagttccaggatcaatgttgattgatgagaatagattgcactgagggatttcaaataccgcgtattcccattacaggtctagtccccctgagaacatcgaccaatttagacattgattgttaatcgccaaaggacaatcgagctgaactccatcgaactaccgattccctctcacaacctggcttggctgaccccactaagccaatcagcaatgtctcgaatgagcagctagacggtttctggcagcaatccccaactgccagctgttcatccaatgcgcgtacagttctatgataaaattttgatctgcaaatcctcgttttcgctgaatccttggccatccctgtctattgcgggaactcggatgatcttctgatttgcctattatggcggataaatcatgcatacttttttccatttcctcttgcaaggcacgatttacagatttatggagaatggtcttgggaatggtctccagaatgtccaaagtacggagtacggagtacacatacgaagcacaatgtcccacctaggcaaatgttgaaagtcacgtcagctcaatcgaggagttattcctcggtattattccgtcaacagttatcggattccctgtcagtttgaacctaatatcgtaccatcacccctccctggtctgccacattgtatgtagacctgttcggtgattcatcccaactcataaacccaaaattgagaaagctccttcgtactgcatttgggggcctgcagatttagttcattacgtggtacaggatctaggaattccagaccgggccagttctaacggctcttttgatatgcacttatccttgttgtaatgtacggagtatgatacatggttattccgaaatagattcttgataactatggagtcctcgtacgaagtactccgtaatgatgtactagtatattcaattgcagatcgcccttgtattttgaaacccattggggccgatgcatccgtgccgaatgacaggcattgatatgatggagccctcctgcccaggtgccgtcccgaccaagacaatagtccaaacgcagagacaagtccagaatgctaccattatcacagccgctttgacaggcgctccgagccgagacagattacgagtttatgcacggagtatggagtacgaggtatagagtagcatgattcgtttaaaggggagcacttgcatatatctatatgcatgcgagaaagactcttaccgatacagataaatgtcattacatcatatactagagtcattgcacttgtccacatagcccattatttctctgcggtatctgtaacagcgctcttcacagacataggataaaatataatatgtatagaacaactgccgagaaagagcatgccaagcgctaacgaagttttcgcaatagtgtatccttctagaatatcgaagcgcgaaattatggcaatgttacctatgatcttcggggggctgggggaagccacactaacggctgaaatcattcaaggatcggaggtggataaggcggttgtatcaattgcgtacaaagtactccaaacggagtaccccgtaaagtcatattctcttagaactaccccattagaaactatcgtctatcatagattattgcccagtgggtgactgttcgcattgagctatggattcccaacccctgcaacatatcttagtggggttgaagctttgacaaagcttggaccgagtgtgtatgtatgtacaacagtacgtatggactacggagtaagaaacataaggaataaaatagatccaagagcgcatcacttgcaaaatacgtatggagtggacgatcctcagctccacaaggagatatgccgggtctagatgatatactagacttacactatcgcttggaatatcttggaataactaagttttgattgtcacttacaacatactccgtagttactggcgagtgggccgatgggattttgatcgactatttagagctgatgcagtactagtctctcatggcccgacttccccgaagccacattttatccacctgcctaatgcagaacaccaaaggtaccagcttgtattctgcattttatatatattgtagcagttcagctgtcatggctggttaactaggtaacaagagggaactttgatgaagcgtatatgttttgtgtataaataataaagtaatctcggcgatccagttcatccataagatctctcttgactcattctgtagttctccatactcgggggcgatcagctgggaaaccttacatatgtacggggttagtttgaactttgaggctgacatcagaatattgaggcggaaatgaacaacaactactagttctactttaggtatggggatgagtccgttggagtgatatcattcgaacctctgctaagcctcaaggactattacaatcaaggcattgctttgtatgcctaaaaataatcttactgcatgtgccttttcttgctgttgagcatccatgtaggcctcgtttgccttgttgccttaaagctctgaggctctatctagcataactagcgttatgcctgctattttagagaactatgggttcttctgctctctgtctttggttttccttgtgaggcctagtttacctcgcccctattcaaagctagtagggtcaaaaagagacaatattccatagattaacccaactgtcatcttgaagtagtcaagcaaaaacaaactgtgtgttaacaatcgcaaggtccttaacatatacgatgttcagtggactgtttcacaagttggatctattcttgactttccaacacaacaacattcaatccctagatcacaactcctgaaaacttcttaacaccaacatgaaaagtcctccagcatagtccgcccatacaacaggcggtataattctgccgaaaagtgaggttatattgaactttaaggatgtcccttcgcccttcggggcatatggtcaaatgaaaatatacagagaagattagcatggcccctgcactaaggatgacacgctcaatcaaagagaagctacctatttttttttcttttacaggtcctttttgaggttatacgggtgtgggtctttatgatgacatataattggtcctacgcttttaggaagtcacgtggtatatagtatccacgtcgaaggttcgaatcgaccaatggtagaatattattattccccgctgtgattggcttaggccttaacagtctagagtcgcaacatcaactcccatatcggctgcgcttcctatggatcttctattagtcttacctggatttgaaacaaagcacttcgcacatatcctacctcccctggagcgagctaaagtcaccaccgtcgacgtcatcactcttgactcactcgagatcgcgaaacgtgcccgtgtacctcccgcagatgttcgccggctctcctcctctattgtcgaggcattgcataccgatattggctttgaaaagccacatacaaacacagggaccagcgatgagcctagctctagtataaaccctgatgcggcgaggacactcagctcctcgacgaaacgcgcgttgcaatggaacactataagcacccttgaccccacgatggatgcactgctaggaggcgggattccaacggggtatgtcacagaaattacaggcgagaggtatgttgcaggtgctcatccatgtcttataaggacaggcaggtcaatctgacatgtggatcgatgtccagtggaagcggcaagacccagttccttctcagcctatgtctagccgtccagctacccaaaccacaggggctacgacggcgtgccatgtacatatcgacagaacatccattatctacgccccgactttcacagctcctagaatgccatcctgtcctctcagcactcccggccgagcaggcgccctcgctacagaatatactgtccgtcaacgccatggacctggagatgcaagatcatatcttgaatttccaacttcccgtcgcgatcgaacgttatgacatcggcctagtcatcatcgattcaataacatccaattaccgcgctgaacacgaatcgaacagcatgcaagccctcgccaagcgatcaaccgagctcgcaaaactaggccatctactgcgcaatctcgccgtaaaggaagacgtcgctatcgtgctctcgaaccaagtctacgaccgtttcgagcctataaaaagcagccagtcaaccccacgcgcagggtttccatccataccaagtcaaacggcaggacgtggatccggccctgcctcccccttcccgaagtctcgcactgaacagctagctactggaaatagccagcagccgccatcctctacccctgctatttcctcatcgccatatcacgcaccacatgataaatacttcgacggctcgtacctgattgctcctcgagcacacagtagcttgttgaacgtcgctcaccaggagcgcttccactctggctggggagatggcgcatacccggagactggaccactgaagaatccagccctaggactcgtctggtcaacgcagatcgcctgtcgaatcgcactgaaaaaggaagagtctttcactgtaggcgtttctatgggtgacgatgcatccacacaggaatctcaattccaagatggagtcaatggcaacacctctcgagacccggactcattagcaatgcctgctccctatcgcaagaaccaaatctctaattcgcagaactaccagcccaacccaggctctgaatccaccacacggaggactatgaaacttgtgttctcaccatggacggcagggccgaaggatacaccgagaaagggccaaccgaatagaagaaatggcgaggtagagtttgaaatctggaaaggtggcgtgagaagtacgtgtcgtggtgaatgatgcatatactataaacgactccattcgtgcccaaagcccaaagcttcagtgcgtcttggaaaggctcgactgtgatttactccagatactagtttgatatactatgttggtatgtcctcgtattggaataagcagtacacctctgtagtacggcggtttggccgagtggcacgggttgaatcctgttgccggctcgaaatatctaccaaccaactgtcctaccataacttctattttgctaaacttctcttaatttaattcggagatgccgaatatgtatctagaatataccgagcaaagaagagagagttagaatatcaaggtggaatatcgctgtagatgaccttctaattctcatgaatcataccacttgaccattggctctagtctttttgtatgcaaagaagaaagtgaaaaaggatgaaaacgcttcaaattaaccacaatcatatatatggacgtctctctaaattaacacatctctttctccccttttcaggttcctttcttctcccccccaacatcctccgacatgctcaaaccctcaccgcagaaacaagataatggatctaaggatcaaaggcaaagagatataatgtgaagacccgagaccacaacgacaatcacaagagaagaatcatgagcgtctcaaaaagagaaaaaaagaaaagcatcaaatttgacttatgacttccgcccaacttctcaagaaaaaaatcgtattgaccttgtgtatatccatccgaaagtatacacagtatacaaataaaacaaagctcaaatcaagtcggaacaatgcaagaggggagaaaaagaaacatcatcagaaccgaacaaaaggcattcaaggcatcaaggcaacatctattgagccttggccaccatcttggaaggaggaatgccgatgccgttgctgttacggtagaacatgacacccttgctctcgccaacggcaccctcggtgggctcaacccagtggcagacacgggcggcggtccacatggccttgaagaaaccagtccagccggtgtgagcctcagtgcggtagtggtcgcccatgacgcccttgatggcatcgctggcctcgtcggcgttgtagaaggggatgttgctgacatagtggtgcagcacgtgggtctcgatgataccgtggaagatgtggcggccgacgaagccgaagtcgcggtcgatggtagcggcagcgccgcgggcgaagttccacacttcaggctggtagtgagggagagtggggtcggtgtgctgaaggaatgtaatggcaactgaaaatattgttagcaaaagggatccgagagaaccgagatttgaaacttaccgagccagtggttcacccacaagtacgggagaccgtaccagaccaacaggttcaaccagccgaacttggagccgatgaagtacaaggcagtgcccgtaaggacaagacccaagtcactcaggacaatcagcttggcgtccttggcctcgtacagagggctggaggggctgaagtggttgacaccgccgccccagccgttgtacttgcccacaccgcggccctcgggctggcgggcgtggttgttgtggccggtaacgttgttgagcaggtacagaggccagccgaagagctgctgggccagaaggttggcggcagtcaagatgggagtctcctcgcaaagctcaccgagctcgtgcagggtcttgccgacgcgggtagcgtactgctcacgggtcttgggcacgaagaccatgtcgcgagccaggttaccagtggccttgtggtgcttgccgtgggagatcttccaggaaaagtagggcacaagcaggagggagtggcagatccagccaacagtgtcgttcagaaccttggagggagagaaggcctggtgaccgcactcgtgagccagaacccagacgccggtgccgaaaagaccctgtacgatggtgtacaaggtccagagggccacgcgggctggcatgaaggggaccgtctcgggggtgacatagttgtggaagagataaaagacggaggcaaggatggccagatcccggaagacatagtacaaacttgtggcggcggagcggtggaagcagtgagcgggaatggcatcgcggatctgcttgatggtgtagtctgggatcttgaactcgttaccgtaggtatcgatcatcttgctgacctcctgctccgaagccatggaagaaagggaggtagaggagggggactggcgagggctgtcaaagggcgaggccgaaacagagctggttgttgaggactctgtagcggggttgcgattgagcgcaacgcgcttggggattgcggtcgacgacatgttggatgaggttgacagtgttcaactccgaagtcacgatgggtatactcccaatgtgtccctactgaaatgaaacaaaggaccggggtttcaagacaagggatctgagattggattagttgagattcgtcaagttgagggcctggggtttactcacgatattttgagtttgggggagtgtagtcgcactagggacagaggttgaagcagatccaagcaagtgccccgttttgaaagagagccaacgagaaagcaggcaattgactagcagggaagaaaagaaagacacgggagaagagaagggatagctctctctttcaaagagaaacagaaaaagcgaaggggagaaatcgaaaaaaataaaagcgcatggaaccgtggggaggtaatttgcataccgccactctctgtggaaggccaatccaaccgtattgcgttttgaaaaatacaccccatctccactcccttcgccctcgacagctgagttttaacgcgaactggccagaagagtaagaatagggctgatcttgtcttgtctgtctattcacatgccgattccattactatgtatgtatgtatgttgtactccatcttcttacttcgatgcgctttctactctgtgtgttcttcatagccaccgcctttccaccagatcccgttcgccccaacgctttcgttattcgctgatgtgatctagacttccccggtgattgtacctctttcacatgccggcaatacgttgaaatccccaactatatgtgggcagatcggaccaacgtgcctcggtgtttgctgggggtttgctaggggtttgctgtacattggtttaggaacctcccatcgaatccgagctcccaccgaatccgagatgcactatcacatacggagtatattgtacgaagtactccgtatggggtagcaattggttttgctttttgcaactattgaaatgcaatatccagcccctgaaccccctacaatataggacagacatgagtgactgtctcttctgtgctccgtaagcccgcatgtacggagtaagcccccatcagagctggagatggactcggcagtggcatgcgcaagggacatgtgatccactttgggttttcgggtgtccgggtataatccggcgatgggctattatctgttctgttctgttcagatcaatccagtctggaaggaagaatagaatactaatctcgagaagctaactataaatcataaatctataaatactgtgtctacaaataagcatatccacgttaaagtagagtgcaaaatacgccctcgataccctcgatacatactccgttatatacaaatcgcctcttgttgggacccttcgggttttgttggggccccactccccctttttgaaaaatacgcaaacgttaatttttactttccgatgtttaattctttagcccctggggccatcacccgtggacaccaccttgccaccttagataagatctgatcgggcggggaccgaggcgccgatctcggacttttgtatattccagaagtgacggcctttcttctgtatgagttatttctatagttcatcaaaaaccaactcttcaatcggtatccagcttactcaagagggtacaagaagccataagtgggcctgcaaccccgtagaagcgacctaaaagaacatcgagttcagctagagattaggctaatccagattaggccacactagtctgtatcgggtcaagggccaacggaagcaagccactagaatatattaccgaggatagcaatggagtacggagtacgattgaagatttcccagaagaataatggattcatgaatcgtagatctaaatacaaacaagtacctcagctagctcatatacgactcattatacatatagttacccacacaccccgcacagacctaacgaacctcctccgtccgtcgctccgaatccacaagccaagatcccccaccagcagcgtgattaccgccagcggcactaagactcacggtcgtcttcttcaaatctgggagtacaagaaccgtctcactatggttacggtagtcaatctcacaagggatcgagcgacgagccggcgccatggaaccagccggatcggccgctgtcgggagctgcggagcggatggcaggaacgtacggatctcaatagccgggagaaggagatggcctggtttctgagggaggagtagaaccgtgaagcgtttggtttcgccgtcacgcgcgaggaaattgccccgccgccggccacctatttgccacaagtctggattgccgtgcacctcgtaggagcattcgaggggttggtcggcgttcccgcgggtcgcgggggaacaccagcggcgcgtgtggcggagacatagctcggcggtgatcatctggccgacggcggcgtgggcggagggccccggatcggtggtggctttgggctggagctggaggtcggctgtgtgcacgactgggatctcggggacgtcgacggggatgatgatgcggcgagtcgggatcgtgggttgtgcggggagctggatggtggagttattctgtttcatatgtgagtaacctcgctcgaaacactcgggttggttcttaccttgtgccattccttgagccactgtcgcacatcctcgccgggtgatttcaaagctccaagcagatcgtcccatcgcacagtctgatagggcagcatgtttacctccctaatcagcccaatggcttccatgtcattcgtggacagctgtgcgcggaaactgctgacaatgtgcgatgtaagcagcgatgcgtactggcagaatggactggagttgatagaagctgagaattgcttttcgactgcgtcgagacactcatcgtcgatacatgtgaagtcaacgctcagttgtaggctacgcggtgttgatgcgattgtgttgccttcattatggcggattttgtaaagaagagacgcgggctgcttggggaagacatcaagggcaacggggccggtgatgctgctttccacatcgtaaatgtctgagctaggtagactgcagttcatgatacgaagcgggatcagcatggccgggctaatggtgaagcgtgagaatagtatttcgtccttgaaaatgtcctgcacgttgaccgatataggtagcgtggaaacgacattaaatgacgccgaggaagcgaatcggccttgctcggtctcataaccaatctctgctcgcgcggagagggtcgaaaacgcctcctccacagtgtaggggatacgcagtcgaacgaatgactgcgcgggaaattccgcgaattcgataatgcccgactcgtggttggcatccacctcgagcgtgccctccacaacctccgtctctgcaaggcgaagccgtaggcctgcagtacccggccggacacggatcgtgccactcttgatatcgttgcgtccgctgtggagttccagctccaacgtccgcatggcctggaggttaatgatatgcggtgacacgatcttcgcccgtagggcttcggccggagggtaacaatagatataaggctggttgtcggtttcctccgaatcttccgtttctcggaagccaactggaagggtggagtcttgcccgccgttgaagttaaagacaagattgccagccctcatctcgagacggtcaatgaaatacttgccttgaagtgtagtctgcgtaaaagttagttacttgtagcgaaagttatcctacgagtgcttaccgagcagtcaatcaaaagctgtgttgttgatgatttcaccacgaacttggctgagctctcgatccaatgctcagaattctgagagctgttagcgctgaccagccgaaccttgagattgtcaatctcgatctgctgacccaagaggaatcgcaaagacagttggatctggaatccatccttgtcgtcgtacagtcgaatagctgggtcgacacggagttcgccaaagaagtccgtcaaggaagcagggatatccttttgaagagcaccagacgcttcaaacaaatcatggacatgtccttctaacatctcttgttcagtagatggaatcgtgccagccacggacttttgcctgactgacaattgcgcctgcgcatatgtagcaaatttagaaagcaaccgtatcatcatccggacatagtcctcgttccgtttgagctccttcaagcaccgcgcgtggagttctaacatgcttccttccagaataatccagtacttagagccgtagaagggagccatccgatggaaataggaagcagcagactcgtagtctttccggcggtatcgtatgatagcgatttcagccagggcctgttcgacggagttgacacggttggctgccatatgatggcggatcaaacggtctgtgagctcttcatagagaaacaggaaggcgtcttgcgactttaatgcggccttgaggccagaaagatgaatgcccgcaagcgacgattccttcttcttgggggtctgtgactcttcagtgtcatcgccatccaacgaaatctccgcgagttcacttgccccagaacgatagcgatcatcaaagagaagaccgaggttgttccagttttcagaccagccccgtctgcgagcaatctcctcgagagatcgccgagccagaagaagcaattccgccctcccggatgagagctgttcagaaccagtcttcagtgtgagaataggcgcggtcttggggtgttccatagtcgaccgccgctgaagcaaacccgcactatcggagatatcctgggtcactggccggccaggttgggcaccaggtgatcctatgagggaactagagcggcgaggcacattggtacgggaatctgccaccgtggcagcagcggcttcggtcgattgcgtaacggcatgcagggaggattcggggagcatgagggtcggagtagaggtttgactcaggatctggaaagctgccgagaatgcccacgtggagactagattgttgataatatctgccttgtcatcatgaactacctccgccagaccgcattcgagatcatagcggagggtacgtgcagctaaactgatcaattccgttgctcttgcgcaaatctcagctagcagaataagattttcgggcttcttgcctgatttcgccgcgttaccccctgccgcaggttcgctgccggccagtgatggagctctcgcggctcggagtagtagagtcagttgacgagagaagatgtatgtacggaaatcgaagattgagatatcgctggccaaaatcatttctcggtatgacatcttgttggcgttaaatgggaaatcccccggttgaagctctgaaaagagagccgcttcatcttcaacgccgtcgctgtcatcggaagcttcggtctctaacgcttttttggccctctcggtccagcttttactggtgaccgagagtgcgccactgtgttgatcattactcccatcgagctggtctcgaatagccgcatccaagccaacagctagctcatcgtatcctgccaacgcatcttcaaacaggcccacattctcgaaccccctagccagaccttccttaaggatgaagaacgtgcagaagttccagccaggcaaactgcgctgagagtctttctcctttatatcctcctcatactgcgccacacgcagatcaaacgaagctagaatcccgttcttcattttatcaatcaaatcctccaactgctcggctaattcaggggatttggtccccggcttcggaagacgcagttgggccacacggtccacggcagacttggacgacccattgaaatcagccttcgccttttccagcactgtagttgatccacggccccatttggaggtagtggccgccctgtccgcggcatcaccgtccggttccacgtgcaggataagccactcgaacgcatcgtgcttttcctgactagtagttgcgggctgcgagctctgggaagatgcgttggccttgatccattcgcgaaggttccgtcgggctgtcgccttgtaggtttcgttgtcgtcgcatcggaggaggtaaactttcaggtatggtgtctgccgtagaccggggatctggtgtctgcgatgggcaactgtgccatggacagtgtcgctcgatgattcgcgctcgtttgattcttgcgcaggtacgaagccgatgcggagcgactcgattgaccgcacggggcgggtgggcgatttccagtggaggttttttagggggagctttgcttcgatcacgggctgaatgagcgggaacaagcccgacggatctgtgtattcgactgtattgtacggtcagcgcaagcgcaagcttcattcgtctcaagcaccttggtcgtacccgttacattgctcgaagcctgcgaagggtccatgatttcccgggcgcgatacgggaagtggccaattgacttcaggacatctcaatatccaaggtgcatgggagatttcatgcgtctggagttaaggggaaagtcgcggggtgagggagacatgctgtcaacagcggccacgcacggcctcgttcttttccattttagtgcgccatttcagtgctgcttttagatttggatcacaactgggcttttctttgttttaatatttaatttagagacatatataactctagatatgcacaaaatataggaatctatatattgtactatatgtgacatatattcaacagaaaactccgtaccaccatggccccggatctatacacgacctcacacttcaacctcaaacaccttcgctagcacggcaccaccaaccaaaagaatccctgcctgtataggcagtccaatacgatctgccacagaaaaaggaaccagagcttggttttgtggcctcagcatctgtggataaaagaacccagttgatgtgacacccagccatgccatagaccacgttaggccaagagccctttgccacagcggtttagggattttttgacttggtccacaaaaagatttccaaagtgctttgacgctatcttcgatcatgagacctagaggggccgtgatgaagaataacatggcgccggattcctgcgctgggattccttggacaatatcaaggacgagatgcaggccgcccgaacaggagaaaacaatcaaaacattcatataccgtgctatcaacgaccttcgggtaagacctaatatgtcccgagtgatgaaggcgctgacagatgtcaggggattttgcaacaattggtgccagaatttcctacaatatcgatgtgagtataatatcccttatctttatataactcgatgtgaatgagcttacccccagaagccccgtaccgtatcggcatccagcgctcttccgaacaacggagggcaattcgcaggcgaatcgagtccaagtcctacggcaataatcgaaaaaacacgatggtggaagtcgataagaatccggctaaccacaaatccagccgtgaggtttgagatgatgcgttcaatccattgttcggttgttatatcccactgagggactggcggcaacattccacttttctcttgctccaatgcctgttgcaacgcaagagtagcaaagacatccagagctagatattgccaaacagcaatggctatctggcgaaccaaaaagcaaccccgaggaggcgtgttcataccacgtcgtttataatacgctggctgtggtggggcattttttatttgccagggcgtgttgatcccacgaggatcagtgaagagccgagctgcggcgtaaatttgagccacaaagccctggccagctccagaagacaaatcattgctatctttggggttgatgagtagcaggttcaggcattggaagatgatggtcacaaataggcgagcgagttcacaccatacaaatcccggacctagcgctgtggccaccggtatagctcgatatacaatgaagatagagcatggaatcgacagataccgaagagcagactgctttggtgttgcgattaggagggccacgggtataaggcaatgggcggcatagagaaagagaatttgcagaatgttggaagaggttgacatggcccgcttatccccaagcaaaaggggaaacgcctttgaacgagtgttgatgttgcgagagatgtgattttctccagaaaggggcgatcctttcttattcttcgtaggatctgcagagaatctcaatattgagctgcgtgggccctttacggcgagcgataaatacggaggcgacaaaatatatccatcttgtttcagatcgtgaaattgatgctcttctcaataactatttgtatcttgtttcatacttagaataatatagccaacttaggcgtatcataccgtcactacagactttccacgccactaatgtatagatcgcatctgcaaagtatgttacagcacatgtcacgatctatgagatgatgatcggtcaggttttttccgtccacaccaccaaacatagggctttcccagcctacaagggtctcgcatatgtttaccacttcctccacatagtgatgcttccaagcgtcgtctagagtaggccaggcaactgcaagtgtccgaccaggtactcgagtcataaagagataagaccgggtattatccttagtctcgtgtataacacgagggatcttaaagtaggcttctgaccatggacaaaagctaacgtagtagcctcggacgttgcgccttcttcaagcgtcttaacctaacaaaatacatcattagctatcgaagaacgttctgcaacgtcatatacgaggacgatcctcgggttatctgtaggtagtggaacggtcggaggtagagggacaggcgcgttggtaagagtatagctaagattatcggtcgagtcataccaagaagagacatcggaaggaccgctcgaagaatggaggatcaggtcaccaataagccatgtattctcatctacctgcttgatagactccctaacagggtctgccatggtctttgagctagggcaaatggtatcaaataacttgtaaaatggtggatcacgacagtttgagaaaaacaatagatggaagaccgtaaatagctgggggggggggagataaatacgggcggaatgtaaacaaagggccttgccgtatacatagatacctaggcggtacaaggataatataccgtggagctatgagtgagttaatagaacagatgatgttggctgtggtaatgataatatagggaagtattggtagatatgaagtcccattctgttcaactgtcctaaaattctcattgggatatatcaagcgcagaagtaccaaaatactatgccttcaaagcgatgctagtcgaggtgaaaatgatcaagcagaatgagggccagagtcgataataatagtcgatgctcgccacgttttaccgcgcggaattgatagcaagagcgcgacacgatcgtgtgcgggaaagagggaccgggtatatgttgtttcgatctctgataaggggattcactagtatacccctctcttggagattataatctccagactggtgatttagtagacaacttgtcttatcaaagtttctataaattgaaagacggcaaattcccgacatcaatattctccgctcatatcacagttatataaaccgacatcctagggaattccgaacaactatcaatccccaaatatggacacagctctcaacgacgccgtggctcgatttatcgagcgccaccctgaatcgcaacgcctgcataagctctcactcgaaagcttaccgggaggaaatacccgcactgtgctgcacacagcaccatacccagtgttcatgcgcaaaggctcaggctcggaattgtgggatgaagatggaaacaagtaaatacatcgatctgagcctctagaatgtgtagactaacaccaatttcccagatattatgacttcgtcggcgagttatccgccgggctatatggacactctcacccgacgctgcaaaaggtgttgacagataccattcagaacgtcgggctgagtctgggagcgacgaatgtctacgagcagcgatatgcctcgttgctgtgtgagaggtttggacttgaacggattcgattcacaaactccggaacagaagcgaatatacactgtcttgctgccgctaggaaattcaccggccggcgtaaggtcatcgtcttccgcggtgcctatcatggtagcgtgctgttctttggagacggtatcccggaaaacgacatcgaccaggctgattgggtactactgcaatacaatgatcccgagggtgtccgggaagcgttttcccagaacaatgacattgccgccgttctcctggaggggattcaggggtctagcgggtacatttctgcatccgacgagttcctacgaacaatccgcgaggagagcgagaaagcgggcgcggtaatgattctggatgaggtgatgacatctcggctggcaccgggagggctgaaagatgtgctcgggattaaaccggatcttatcactttgggcaagtatctgggtggaggtctgccattcggggctttcggtggccgacgagacattatggatgtttacaaccctctcacgcccggggctttgatgcactctggcacattccagaataacactctgatgttgcacgctgggtatgcgggactctctgaagtgtatacggctgaagttgttcaatcgctcaatactcaaggcgatgacttgcgtgagcgcttgcagcgggtctttgctggatctaagttctgcgttactgggcggggttctcttatgtgcgttcatgccactaatacgggagttcgcgcggagcagatcacttgtcgagatgattttattggggttgaggctacggatctcaagcagctgttctggttggaactggtgaatgcagggttctgggtgcagaatcgaggatcaattaccttgaacatcgctatgactaccaccgctctcgatgcgtttgttgaagccgtcgaggagttttgcaagagatataaatccttggttatggcttagtatatgtgttatcactacagtgggttcaaaatatggagaaactagatgttcgaagaagtatttagatgtgaatctatatgagaatgtgcaacacaatgcattgcacattagacataacactgcatacctgagtggcgagttttcgatgtaactgcaacagctcagagacaaaggccacgaggttcaagatggaaaagtatataaaagcaaggacagtaagactcaatcgtgcggattctacatagatagtcgtgccgcgtcattatgaacacaaataagaaaaaaacagaaacctgacagttagtccgtcatataatagggaaggttcactcgctcaggaacaacgccatagaaatatatgaccagagtaaaaaagaaaaaaaaggatggcctaaatgcccacttccacagccggctgtgtatagcgagctttcgcaaattcaaagcagtccgtgacaccttgccaaatcccgggaacgtagtttcggctccaggcgcaaataacgagaataagaagagggatctgtagaaatggtgttagctgagtactactcaagaaaagaagccggtggacatgttggttacttacccagatgaagtataggtttcggtcgctgcctagacccttcattcgtcgagcctgttgctctcggagatgcttttgttgctcacgtgagatcacattgcgtccaattgtgatgtctttgatatcgtcattctcgacttgagcgagagaagttgaagctgaggccgaagcggcggccgccgcggcacggcagtnnnnnnnnnnnnnnnnnnnnnnnnnnnnnnnnnnnnnnnnnnnnnnnnnnnnnnnnnnnnnnnnnnnnnnnnnnnnnnnnnnnnnnnnnnnnnnnnnnnnnnnnnnnnnnnnnnnnnnnnnnnnnnnnnnnnnnnnnnnnnnnnnnnnnnnnnnnnnnnnnnnnnnnnnnnnnnnnnnnnnnnnnnnnnnnnnnnnnnnnnnnnnnnnnnnnnnggggagggggcggccgccgcagcagcactgctctgggcctcgaagtgttggtcgatagctgcctctgttgcggcacggagcagactcgacttcttcatgtcggactcatcggtggcatcggggtccgggaacagctcatcgtatgaaggtggctgattgggattgggtgcagaggtgcccttcaagtaatcccaccagccatcccgagcagcaggccgatgagggacaaggttggttatgcggcgcatcattccttgcccttggtagtcttggagggcgggcatcgcgggcattgcgggtatcgcaggcatcggaggcattggagggagagccgggagattggggaaggcattagccacgctctgctggaattgattgatttgaagagccagctggtcacgccacgccacaagaggtgctggtggggcgtagccttgagcatctccggatgcgacggtttgttcgttattatccataattggcggactaatatcttggtgcatactagaccgacgagaagagctgaattgaagaggctccgagtcggaatcagtagtttcctcctcatcatcgaaatcctctgagtcatcaacagcatgatcaagagatccagaggcggaagacgcctcccacatcgagctaagcgaggctgagctgctttgtcggcggcgcgatgtgagggacccaacgctgcgggaccggtagtgacgagatggaagcaatgcggcttggtgcgcgggaagcgtggtcgctaggtccgcggcagtgaagccccgtacgctgcgagtgttggggttggcacccgtcagacgcaatcggtggacgatgtgggcatggccattgagtgcggccagatgcattggcgcattgcctgtgttgtcttgcacatcgggatttgcacctcgagccaaaagacccgccacaaatcttgtcagtcctaacgatgctgcgaagtgaagaaggctttggccggtcgtgctacgagcgttataccgcggtggccggggactgtcatccaagtcgatgaactccaagtaggtcagcatcttggagtcgagatcgccgagcttgccttggttttcaaggcccggtacttggcgttgctgacccccagatgagttaccttgcatttctgactgcatattgaagaacgcgtttggatcgcttcccatgatttgttgggctgtgtggaatgcatccgcttggcttcccaatttctgaccaagaatgttcagtgccaagcgatacatttgaagctcacgatcatccacatagcggaagaacagctgctgtttgggcatgaggggttgagactgttggacttggccaaatgtcgggtgttcatgtttgaataccacagacaccaatcccggttggagagcgggtggggtcaggcagttgaggcacttgtcaccccaaaatgtggttgtagttgccaacgtgtcgccgaaaacaacctccatgccgggataaaatccgctgcccaacaatgtaacctcagtacctcctgtgatagagccctcggctggcaccaacttgtggatcacggatggcaatcgattgagagtattgttgagaggaggccaaagttggcttgaggtattcgcaccaagacccatgggaacatttgaatcatggaagccattgcgattcgagccacctggtgtccccggacgactgggatgggtggagttgggcgttgatgccactgctcccccgaccagggtatccaaactttgtcgctgagcaggtgtcgggttgaagaatggattgttatcattgttctggttgggagtgggagggccatttccatattgacctgacatggcggacggatttacaaacggccgttcagttggtgaagcgaacccacgagcagccgcaagttgcgcagcgttgttcatggccgctgcggatgactgaggtgtctcgagtcgtgtcatagtcagttctgatggaagccttccagagctgctatgtttgcgtcgtttgctttgtggtccttggaattcagatggagatgctcctcgagacaaacttctagacgcctgaggcacgtgccctccgttcgttgagcccggagccgcaaatgaactgggcgtaagctgatattgcgaattgaacctttgttgaagaccctgtagatcagttggcgactgaggtgtaccgaaagtattttgcccgttatcgggggtttgacctgagggaaacactccagctcccggtacttgcgtcccatctgggagggatggcgaagggccagtcagtgcaggcgcagatggggcctgcgtcttgtggtcgtccgttatcataatcgaatttgtaattgcctgcgccaccacgttgtccaagtgatccttcacagtgaagataacctggaatccgagcttctcattttggtgtcggcaatagcatgcaatacgcattggcagttccacttgcattgatcctggtgggaccgacgatctatcgccgtagccaccgctggcattctttgcgggttcggtccattccttgatctcgctggtgttgaagacgatcacacgcttctcttcatctttttgaaacaattcatcttcttcgggcttcctttgcttcttccgtgacgcacgtttccgttctcgctgtatacatccactgcagattttgacatcacctccgtccaacggacgttcgtcatccgaagttgtttgatagcgatcaccccttgtccgtgcaaatgcccgcttgatcttttctctgtcttgcatggcacttgtgcatacgagacttgtaaacaattgaagggtatcgcgggtaggctcggtggcaggaggagcaaggaatttgagttttgagatggtgtgagagggaagacggagtttcttgacgccggtaggtagcggggagagggtcaatcggattggaatttgagtctcaacacgggatttgagggaagttggatgcacagtgagaataggttgtagagagtgcgcattattttgaggttgggctggggaggaggcgaagttgacaggaaattggtatgatgtgggcgaggcgaagttcatggcgggtgataacgaggcgtggagaggtgattggcgattcatattgatgcctccgaagctttcttccagaagagacgaaggagactgtccgccccattgcggagcggctctatccatatcgtgaggcattgaggtcgagtatggagattggccgttgagtccaaaagcgaagaacggagacccgggagcatgaccctggattgttagcaacgcgacaaacaagaatattgttcgaatgacttacggaaggcacggcatcaatggatggcagcccagtgtgattgctcgaaggactccagagctgggatttcgcgcgcttttggggcctcgggagtgagccattgtccgtcttcaatggactagggctactcgctgcactttcgaaatcgaaggctgcatccatcgccttgttactgacttccagatcaggatccatggagaaaccatccataggaaaagaaggatcaatattgaagggcgattcctccttgactgacgataattccgggcgcatccaatcctccgacgggtaactagtagagactagaggattttcactatgcgttgcggagttcgtcgaagcgaccgatgtttgtcgtagatgattccgtggcgattcggaggaagaactgcgacccgagtcatctggcgattcggctggcgagtccgcggcaagactcggcacttgcctcagaggattttggttttggtatggctttgaaggccccgaggcgccattcgcacgggatgttgtggctcgagcgaataggtcgtcaaaatctcccccagcattctcagttgacatctcgagttgtgtggggtccaaaaagtccatgtcgtcgtccatgatgataggatccagggcggagaatgagggcgaaaagggtgcctgagctgatatcatgcttcgtttttttcccccgtcttgatgcttgtgaatcgtagtcgatttcaaccgcccaacagccaccttcacgacaattgaatatgacgggcgattcggtcgctaaaaaaggaatctcggagacggtagagatccaaagagtatgacaatcaagtcttgtcggagtttataccaggaccagtctccgataccatggcccttgttgagagagattcgaaggtggtcggggaaagtcactgccttggggttatctggaggaaaggggagcgggaaaactgtgaacgccgatccaggccggcagaatctcgacaaatggaatcaacgattctgcttgaatttatatagtcgtgatgatagaaattaaatggttatagcagttgattgagacacaaatgattctatgttctccatatactttccagctcaaagtaaagccctaaatggcatttgtgcttaaaatagacacctcaggcctcacaaagcggtgaccaatacagtacgcaccatacgcccacccttcccgtatcttccatcgctttgatttgctgaccctacttctcccgtctgacaggggtgtgaggggatctgactctgggttctaagctgttctacagcatgcggaacagtagtccttgagatcttggaagactctgtatgacaaaataacttcttctcgctttgtgatacactttctcccattcctcgggctgaccctggggcccaataattggaacgaaaaaaggacatgtgtacatgcatgacgacgacaacgtaccgggatgccaagcgcacacagacgccattcctcgcaaaggtagagattgtggcacccagttatcggctgtgtcctaccctcgctctgttagagtaacacaccttggtggcctgcagggctagctatcgttttctgtgtgttgcttattggatatcatataaagatgctatgtaggtgacactatgatgcacttatgcttacgatcggcggaatcgccatgccaagggaccaatgagcaatgctgtgctggcatacaaaatataatggtgccaagctcagcagcgtctagggttagcgggctgcagattgtagagattatgtatgttttgtatagtaactatgaacaaaatgtacataaatagtcctggcatcgctttgcttaaccctcccacgacatgtagttcgagacaacacgggaagatatagtgtgaaatgaaatctcagttatctactctctactcctaaaacatatatttagaattaacactagcagtaaatcaactgaatcagactcacattccagaataataaatctttacttttcatttttcctcgagctaggtcatgttacgactaggtaccttttgtatgcagttgctatacaaaaaatacatcgactctataatttgctattcagcaccgacacttcatgagcttggcacaatcatcttacgagagcctccatagacagtggagaatctcttcttctcccacgtgtataatgcggactggttcgattataaggtcttcatcagccaaagatatctgccctagaggcaaagatctacggagtagttcctagcgagcaatcacacggctaagactggctagatctaatcgatcctgctaaggattcacggtcgttgaactaatttaaagatgtttcaacgagatgaattggtcaaaagtctcaatctatttgataatttgcgaggaaccaactccggaataatatgatttctatgtggcttgaacaatttcacgattttggcgcctttgcaatttagatctgacagaagcgttgaatatagaccgttcgagattttcgtcgtgaactcctggaccctattatgcaggagacggacatgatgtggagcgtctcggaataattctaagcgctggggtctagggatcatatgtaggggttcaaatgaagccttctggatttttaagaaaaagccgttgaggttggccatttatatagggaaattttccaacttactccgtgtttcaacaccgtagtctatagacaatcgacctgtccgaagtcattgtgggataccgaattctccgggtttcccctgaagcggaattaaacaaggtctatctctccgaaacaggagaaaaacccttacaggctggaaagagcggagatgttatcacttcaaggggttcgatgaaacttggactgtcacagacaaccgcccacgatcgacagccaccaaagatatgagacaatatcaaacgtcccctccttgatgatcccaatggagtatagctcaacaagggttatgcactagtgcagccggcggtttacggagtaaagtccatgcttcatctatatggcacatcctagatgtctcggtcgctaattctccacctataggcacatccacaaagtggaatcattgttccctgctagaaacttccggacttgatgatatccgctgcgatatggatttcttggcaacggagtgatgccgcttctgtcgaatgggagctatcatgtcaggaccctacatatataaggccctggcatccgggctactggatttttttctcatccatcctttgcattccattcatttcaaggtctagtaccattcattcgttctctttttgggttgacttcattgactgaagtccccttttcattctttttcgctcacctttgatacttcgatccttcgatctaaacgctgtgcgttttattctacaactttttcaagatgtctgtctcaaagattgcgggtctcctgcttagctcggccgccatggtcgctggtcacggtttcgtgtcgggtgccgttgttgatggcacttaccacgggggcttcatcgtcaatacatacaactacatgaccgaggtgcctgcgaacattggatggagtgaaaaggccaccgacctcggctacatcgacggctctggctacactggctccgacattatttgccacaaggaagccactccgggtgcgatctccgccgaggtcaaggccggtggctctgtcgagctgcagtggactgactggcccgagagccaccacggcccggtcattacctacatggctaactgcaatggcgactgctccgtggtcgacaagacaaccctcaagtttttcaagatcgccgaggccggtctgatcgacgacactaacgtccccggtacatgggcaagtgaccaactcattgctgccaacaacagcgccactgtgactatccccagcaccatcgccgctggtaactatgttctccgtcacgagatcattgccctgcactccgccggcgatgcaaacggcgcccaaaactacccccagtgtatcaacctgaaggtcaccggcggcggcagcgactcccctgacggcgtcctcggcacagcgctctacacgcccaccgatcccggtattttgatcagcatctacagcgcactggagtcctatgtgatccccggccccgctttgtacaccggcgcttcatccggctcttcatcgacctcctcgaccaccgccgcagccactaccgaagccactaccgcgtctgctactgtttctaccaccgcggcccccaccgtggctactaccagtgcctcaaccgtgagtgcctctcctatccagagctcctcttcgcaccacctcacccgcacccgcacccgcactgcccgtcctacgtacagccctactttctcgtctgctcccacgtctgctgtctcaacttccgcccctagtgggccagattatgagcccactgatgctccttccaccctcatcgagaatgcgactgccaccgcttcctctgctcctcaggttactgacgagcctgctacacagaccgccagcaccgccgacagcatcaccatcaccaccaccgccggtggtctgtctgcccagagctccgcagccgtcctcgagtctagcgccacttccactgtcactgccgaggctactgctactgctgcccctaccgccgcagccaccacttccacctctagcaccagctctggatcttcttcctccagctccacctccagctccggatcttcttccactagctccacctctacctccaactcctcgtacctcagctccctgagcgccgagaagctcctcgaggtcatccggtcgaccctgaagtggcttgtctctgacaagaaggtgcacgcccgtgctctagcttactaaaatattcgccctacatgctataactatttatagctgtgtgatgtgaaacttgttactgaacatctgtgaaactggatcgggtatcctctgtctctattgattgttctgttcggactgattgtaacaacaccgtgttacggatttcctttatattctctttcctccttgcgttttgcgcatagagacgataggcctgctttggtcttttatttttctactttacctttatgaatggaatcgctggactgctcaattttgtgatctcgtagataaaagcgtaattcttgagaccgtttctaccttgggttgataggacctgattttttgatcctcccttcttcccctctttctctctttctctctcttcctctctctcttagccagctggtttcctttcctatcggtaacataagattatacaagcactacatagatagccctttgacgatgccatatatcaacatgcagcagtttccaaggtaccacctaatacaaagatgcaaataacttaaatcaagttaagtcccagctttctggggtaagaaaaatggcctatatcagtatattaacagaataggacaagcaacgaagaggtcagtgggaaaaaaagaaatagtcctgggacccggaatcgaaccaggatctacgagcttcgaaaagcataggtatgtgtacttaagacacaagcctacccgtcggggcgccgtgctaccattgcaccatcctagggttaggttgggggtaaggagattgagagagtgaagacaagagaagtgtgttgtccgtggacggaaagggagaatgcaagcttcgtcatgctggagggaaatcatatgtaggaatggagtcaacaatctgacaactctatgttagaagatatagggcaagagtaacacagcggtcgatcacctggcataaagtatgtatcttgactagtactagtatcatgtttgacttcgttcatttccatggtatgcttctactaagtttagtctacctggggctatttgcctatgccatgaagttgacctccccgtcggactatattcatcaagtcccacggggaatcccatggtctagtaaaagctagtaccctaaggaccgttaaaatatatcttcagctccgacttatgaagtatctcaatcttccgaaactttaccattgtatacacctaagatcaggtaaatgagattaccgtcatctcaaggcaaatccctcgaggtaaggcaaatccttagtgattagggggctgaaagtacttgccaatctctaatccagtgttctagacaataacatactactctggagtataggaagcaagcttataactgcttttagatcccgggtctcaggactcgctcatccattcctatcctatgtcttcactcgtcccctatacttgccaccaaatatacctggggtggtgcaatggcagcacggcgccctgacgggtgggcttgcatcttaagtatacatacccatgcttttcgaagctcgtagatcctggttcgattctgggtcccaggactattcctttttttttccttacagaatgtcgattccatactcctatttctgatatttgtctatgcactttatcctatgtctcattggtggtacgagcgaaagctaacagttattatcatttcctactttttgagtatgtggatacagatatatatgtcagaagaatatcagcctaggcgaggatacatagtcgtggggaaaaaaagggaaataatcgtttaatatatgtctcgtgcttattatttagtatcctgtttttcacataaaaaatggtagtctctgtatgggatttagacttgatgtgatgattctaggagaaaaaaatgtagaatatgcagaatcctttctatatcgacaagacacctcgttatcaacaaatcagcccggctagctcaattggcagagcgtgtgacttttaactcactagcaatttatctcagatatctgttagcacttgaaatcacaaggttcggggttcgaccccccggtcgggcaacattaaagttgcccactgctcatcttttttgtatctaatacaccaagatattcatttttgttctgttttctcactttgccgttaactatacttcctccttgtagcaagttgaagtgattgtgtggatatacttattcctcatcggcaaattccaggcgccactaaaaatactatctaggtagtacgatatttatccaaggccttatatactccgtatcattgccaagtttaccagataaaggacatttacgaggtctacagccttggcaggacatctcagtctggtgcctagccctgaagaccagatatatgggaggcggttgatactgatatcaatgatacggagacacggcgagatagcagacacgggaacgggagtggcaatggaaggcaaggcggcgagaggggaattgaaattgtcgaatggaacgggggagaaccatggagaggaattgaagcaacagagtgatggtcaattgaatcttgggttgaagaatagttcttttgttttggggggatttatggcggtgggttggggaatatgtatctgagaaggtagttgcccatctcaccatgtatgtttcatctctagcggtatgcgctgatttattgtttgtacagaaaaagtgctctctatctagtggtatggacagacaatcatttaatcgtcgatcatttcttcttcttggtcttatccacaacctcaatcatctgtgacttcaatccacggcgaaccagggctgtctcaatggcctttcgctggtcgccctgcaccaaaacttccatgatccccttgggggcaccagtagcttgtgtgacactagtgctaccggcacacttcttctgcagctcctgtgccaacagactaggaataatgccgaagacctccaaagtcataactttggtaacggtcttggagcctgtccgcttctcgagggtgacatggaccttcggtgcggggcctgctttcggcttgacgtctgcaagagtttgattggtcttcaaaatgacatggtacggcgaaagcagtgttttatcatccatgagtcgtttaagaagaccatcgcgagtggccttgccacgtgccagtgtccccttatcttcggttgatgatgaattgaagatggtgttcgcgaggaatgggttgagggttatgatgcgcttgttctcttttgagatgatcggggggttttgggattcaagatattgatccaagtgactggaaacttcggagtatttgtagaagttatttgtgtcgctggcagcgagggcagggaaaatggttggcactagctttcctgatggccgatatagactctgcacagtgatcgtttggcccactgaagggtcggagccatccagcgcagccgactttttgccctcgggtgcggtcgccttgttgttctccagagcacgcggtgaaggcaatctgtatggcacaaatcgctcaacccgatggtcctcaaagtccacatcccaaataacggtctcttgaccattacgttccttggttttgacaagcttcgatttgtctagatgtttcatgaacttctttacgttcttccaactggttttcttgatgttgtaatgctgagcctgctgaggtgtgtgcacaggaagataaggagcagtgaagttggctatcaatgccgaagctgtgattggcagtggaaggccatggtctgctgcggacggattatcctgcttgtgcttgtagagggcgtagacaaaagcattgacgaatgcgtcgtcgatttctattatttgtcagtgtttgattgatttgagttgggaaaccaactgctggctgataaagagaaaggtaggggtgactcaccctctgttgggggtgcatcgacctcgatgacgggttcttctgatatccttgggtcattgcttagtgtttcaatgtcccccgaggcagctgtcggctcatcatcctcaattttcaattcctccatttgttcttcaacaccctcggtttcatcctcgtcccagccctccaagtactctggagctgcacggcccggcagtgacgcagagctccacgcccaaagttcatcaccctcccaatgcaatccacggacggcatggccctttgtgccttgcacctctcccaatgccgaaacatcaatctcacagacgcccacaaaaagtggcactgtatgtcggtctacactcgcgaccgcaacaacggcgcccttgaccgccctttcagggaacggaggttcattcgcaaggcccggcgtcattaaatcagctccaccatggagctttcccatcacaaactccggagtatagagtaacggaaccaagttcgggttgtgccatagtgtatagacagttgggaatagtcggttttcggcccccgggccgtgttccagcttgaaccatagcacccgctcatcgccgtcgggatgtgtcccaacatatacgaccccttgaagttcgcgtaggtctggaccagcagtggttgtaaaacgagcggtttgagtgttatcgggcaggagggcattccggatcgttgtgaggctcaatgcgggggcagatgcggtgctgggcccagacgagtctgctttggtgggggccgaggtgacggggatttggtaatctttgataatttggtcggcaatcttcctacggtcagaagaccgtagtggagaaagatttttgatctggtctatatgagcagagagtcctttgcggtgggagggttggaaacccaaagcttggaggggcagtgcggggagagaggtcgtttaccgtaggcttctttttgaacataattgtaatctcaaagctcgaagcttaaagtgcaaagtgtaattgaatccacacaggtcagccgaagacgagagggagaagatgtcaagagtaaagatgtgacgtccgatcaaagaatctcccggagatctccacatggcccgaagaggaaaagaactcgttttcttagcatccgtggaattcgcgacaacgccagtctgactcaaccactttatcaatgcctaattaatccattcttccacgtaatctctcccaactttacagtaaagctggcacagaaaggctgaattttgatggaatgggcaagatggttcaatattaggccaagctggtagctaggctagtccctcacagttgagaaacagggtattgctatggtgagaagcattgttgaggtatttatccaaaaggctagagattacatcgaagaaggcagagatataggtacaagcaatgaatcctcaaagctagaaggaagaaagtcccaagtggtcaaaaataactccggacagatgaagaatagcgttattaaatcgaacgaggcatcgtaaaatagtagattgagacatgaagtcaatcgtccgattgtctcggtattggtttgactggtcttctcgatgggcccattccttgggaaaccacaacccagaagcgccagtatgtgcgtcattgaacaaatggtgctgcatgcaggccatggaatagtattatgtatatggtgcaatttccggaacatatccggctgcattcacctcaccccttggtaggtgcctcactggagtctagcctcaagctcgcatcctctgcttctagctgaatccatcacatcatccgagagaacttcaagatgttttcggttcatcgggactatacttccagcgtcggaagttatctgcaatccaccactgcgacacatgggcggcctcgctaagccacctcgcggcttcgggcccgtgccgtgtctggacggcatcaaacaaggacacgatgtcggtgtcttcctcgggactgaactcgagtgggtcggcgacgacattggtgaatcgccacggggcatcggggataagcggcacgacaagacggtacggtttcccggctgctcgcatagagacccacgttcctccagggttcatcgtggagaagtgccattctgacttcttatcctgctcggatataagtgggcgtagcaacgactggccttcgtatataggaagcaggtccttcagtatatgtgccgactgttcgttgatattggaggtttcgattagaatatcgaggatactggggagcatttgagtcgaaaggacggcgccactgatttcgatcgggggtagcttaggatgggcgaggagtaggggaacgtggaaactgccgacgtgggggtcatggttggccgttataccaccatcatttggaagagataaaccgctataatcgagttaatgaaaggttgatagggtctaagaaaaaagacaacttactggtctcctgccatgacaagcagggtttcatcaccgaccccagcctcttcgagaatctcaaggatagaggctagccagttgtcctgatacttgatagtattgaggtaccggttcaagttatcgttccatccaatgccattcccgaagaatttctcgtattcaccaggcttaaaccaaggagtatgggtattgtgagttaggtgaccgataaagaggcgagtattattcttcttagcttcggcaaatgcgtcccgcatatagttctttagtgtatgatccgggtgaccatatttctgctcttcctctggctcctctggtatgtatatagcgccggcttcattgattgattctttggttgtgatatctttgaatcccatgacaggagtaagatcctcctggtggtcccaggtaccataatgggactgcatccacttagaatgccacggccaggaggtccaatcctcagtatcactagtgatatttgattgttggctcaaagcgtggaatatgtgcggtaggcaaggctgataaatatcatgcaggtactcaagattaccttggacaggcatagggctcacaccgcacatagtgcctgtaatacttttcatggtgtatgtaccggatgtataagcatttttcgcgctgaggccaccatagggctttggacgatccttattctctttgaaaccagtctcaaatccggtgaacatttgggcgataggggtgagattggagagtttatccataacttcctcagggacatttccatcccaagactttttcaggtgctccatgatgtaagagtcggagcggaagggaaagacgtcctgccgattgctttctaatttgatgagaataatatgtttgatcttgacgtctccgctgtgaagcacgtcacgtataggctccagaatttcgttctggagattgggaaagtgtagcggatctttcaacgggttgtagtgttcgtacaaatactcgttaggtgcggtattgttgaagtgacttatgcggaagggagaccagtccgggaaggcagtcgctgcatcacccgtatgtaaccaatcgaatgtcgggaaggagtccagagtatttttgtcttctagccagcggaaatcgcccggtaacgacaccacacctcgttgagaggacccgaacctgaggccgccaaaaggtgcgagaggcagagatgcggagaggaaactgtaagtcatatcgtggggacgaacgacacggaggaaaagtagaattgcgctgcacgatacgacaatagcgggcttgagcaatgcctgactcttccgtacaggcgggtctcggggcgcatctagcaacgataaggagtcgctgtcatcaccgagttcataatcatcgattgcgatttcttcataggtatctgggtgtggcagagcttgcttattcggacggaagtagcgataggtcgcggaaattactgcagcccagaccctcaggaaggctgcagtgacccgggatagatacggtgtggcgtagaatgcgcctaccaaaatcgacgtctcgagcaggatagcgacgaacagggctgacaaaacaagcgtggcggcgggcttgtccttgtggaagccactcgatatgcgccagtggatctccatgcccttgtggatataaaaggagatgttggcggaaatcattgacgaggcatatagactgggatggttagcgattcattcgctgtgtgaatccgagaaaggcctacctgaatagcgcagtgaatacggctgctatatcccgagtcgttcgccattcgtacgatcgggcgagactgcgcgcgcccagaatgagcaggatatccagcaaaaagaaggtgggaccccaggcgagaagggacaggaccgacagcgcattgagatgggcgtagatatggaaagccttggaaagcacgagggagatgaaaatgaccgaaaagaaatatgcgcgcgaggctgcccagccacgattaagatggtcctgaggtgatctggcgatttcgagggcgacgatggctgcagattcaagcttcccacgcagccgctgggaaagaccctctttcagctcccagggaggtctcatgatatatgtacaaaaaaagaaaactgcaatgcgtcaaatcatacaagaacgttgcacctgaattaactaaaggacagaattttccccatggatgtaatggaagaggtgtaggagaagaatccgataaggattttagaaataaggagagaccttcaagcagagagggtccggtccactttccacacgcctagaataatatccgacatctttgggaggcaaagatcagcaatgcctatcatcgtagggctattccgccgccaagactcccaaaatagcaagtaagcacgcgatggaaatatctgtacggagtacggagtatctcaggttgataacaaacaggggagacggggacaggtgccagttgtaaactgcctatttgggactaccgagctatttacaatggccatagcatatacggaatactatcccacgatattgcctatgttttacaacatagcaacatttggtctttcaaacttgctcaaggcgtttgtggagatcgccttggcaaagccacgtacgtggccccgtagcgatgaaccttgaacccgttagaattctcctggagctccacatctaccccattggcggttaaccttggaatctgatgctggagcttccaaggttgtcattatgttgtacaacataagtattgtaacatcaaagataactaagcactgttgttagtgaacctcgtgggatcggtcttatcactatctcatcccattcagctgaaggatgcacgatgagatttggtatagatcaggtggtggagcataacagtaagattaccattttagccacatgaaagctgcaaaggtaaagctgttcaaaaaataccacaaacatctaatagcaaaagtcaactcgttgggtttagggctaataaaacaaatagtatatcacccgaggaagccacagcctatgggctgtgttgcgatgccaataaggcaaagaaaattaaaagaggtcaccacaagaaacataaagtgacattggagcgtaggtaggatcatagtacagggcccgaaggatatatagttgaacttcagggttccgcatcaaggtttgtccacaggtaactggtgctgtgctgttcagtgccagcacgtataaatctcgatgatagagaaattaataaatcatggggaacacaatacaacatagggctgctattatgatcggcggtagggtaaagtctaatgagtaggcaggtgaaattggtgcctggtgtaggaggtagaagattccaaggacaaaaatagttatacttaggctatatagttaccacaatatgcaagactaatcatcagcaagagggatccccaatgggtccagagtccactgttgccatcaagagctatatcatcgcatacgatatccataccaaggcatcggacatcccccgagaaccccaccggcaccccgccgagcataaagagacaattaccggatgcactaaacctgggtaaagtacatctacccttgttagtgaagaatcagccaaaatgccagtctatcacatcggtgagttggatgcaggtatccaaaggatacgaaacatcactaaccaagctccaagtcctcttccgtctcaaatctggtgtcaccccggcccagatcgcgacctggaaggagacatgccagggaatggtggggaagattcccggtacgtgaaattctgaagttcagatcgagacagtttctcatgtaaatcctcacaataggactgctgtcgctgcagaacggtcccccgctgccaatttcgattccccgcgcccacggcttcgatatgggacttgttgctgttttggagacgcctgagcatgtggctacctatgcggtacaccctgctcacttggagtaagtcttcttcgtcgtcggattagtgaggaccgtggctcatttgctgacaccttggagggttcataaaatgcgcgaggagttgtgcgatgatactttggcctatgatctagagttctaggcgtttgatgtagtactaggtttcccataaagcgaagaaagttgcgaacagtccgttcaaaagtctcatttgtacatatcaaaccctaggtaggccccgttaatcgtagccactggggcctgcctagccaacccgtagatgctcgtaatgaaatgacaataacgccgatagaaggttcacctctatgaaataatcggaaaatagaggcaggtgggatctccaatccgcaatactttttgaatcccgctgattgaccgaatcagagaacaagaattaaagacaagacatttcaatccgccgaaactggataccttattccttggcatccaccttcttggcagggtggtcaccgctggtgccctcgtcctcacgggagcgcttctgggtgctctgcacgaccgggacaccactagaattgaagtcagcacttatacactcactgcgaatatcagatcactatgacttaccgggagtccttctgggcctcacggggagcctggaagccattctgttggtcctcagtgcggcgttcgcgccagtcacgaccaccatcacggtcattgcggtcacggccgccacggccacggctaccaccacgaccacgaccgccgcgaccaccacggccaccacgtccaccacggctaccaccacggccgccgctgttgcgagcgttggaggggtagacgttgccattcttgatctcctcgaccttctcgtcgcagtactccttcttgctcttgaagatcaggtcattctccttccactgaggcttcttctccagagcgaggaatgccttttgcttctcctcggactcaaactcaacaaagatgctgcccttgaaggtcttgtcgttagtgcggcgcagacggatggcgtttgtaggaccgtagggagcgaaaagagcctcgatgtcgagctgtgtagtgggttcttcctcgccaaagccgaagcccttggcgtagatggagcgggccatggaggcatcctcgaagaccttaacggccttggcgtcgtgctcgtttacggactcgggcagagggaccttgcgcttgacggcagtgtcgttctcggtgagttcgacgttctcggcggtcttgagggcctcgacaattgccttgaaaggttggaagcggcgcatgcgcttgaaagagtgaaggagttcaagggggacggcgttgttggcgctgccgccaaccttggagagcaggaacttgtccattgggaggttagaatcggaaaagtagaattcgacctacggtatgcgcgtcagttaagatctagtgaaggagcgtttcaaatggtcatacctgcttgcggatctgcacagggtcgtcggttacctctagggtggagggatcaaacttggcgttgttctggcgagggccacggccaccgcggccatcgcgctggaagctgcgggtctcgcgcttctcagtctggggctctgtggacttctcctcggccttctcagacttctctccgagcttagcggcttcggcgacaatacgggcctcatcggcatcctgagcaggcttctcggaggtgccttcttccttcagctcggcgagaacattctgaacatccttctcagcctcggcgttgacaacgggggtcttctgttcttcggtcatagtcgcgaattgtatgtggagactatttcagatggcaaaaaaaagatgataagcaggaagtttcgacgcgacggaaatgggtcaaagaaagcagaaagtgagcaaggggtcgaagggaatttatagccaatctcgggacatagggcacaatacctttatgggttgatcaatgcgctattcagaaaactattgcgcttgtgacaatatcgcggcggggagaatctgggaattttttttgagctccattggcgcctgaggcaggaactagtctgcaattggctagcgtggactcgaactattccctttttggcaattcaacgttctctatacattgtcttctattgtcttcattgtatgcaggaaaaaatggaataacaagagatgaataggagtagaaacaaagttctcgaagggaagtattgatttgactcatagtaactacattatgtactcatatttcgtcaagagcgtcaaagtcagatcgcaccttcccgaaggccaaggtgatttattgatatgctgactccctttcccgggggtttcgaacccatattgtcatggagaattctctcttgtcaaatatcacatatatcttcagttgaatattatttcctggtcgatgataatccgggtaccccgttcaccgcaggatagtaacattatcaggccctgagttgtaagtagcgtctgtcaacccccggattcccattatgttaacaaacgggatatatggtagttgttctccacatacaataccaccggacccttcacttgaagtgctgttttcaatattcaacaggctacaaagcaggttcgccaaatcaaaatggtaccatcacaaagggtttcgtgggttgagggaacctggccgaccaaagatgtattcctcccttctcctgggctcgagatgccatcctgatcatcctcaacagatagtatacctttcaatcgtcggtccattgatgcttgcagctctgttcgagtggtttctctggctcagcgccttcatatactgcctgatcaaggtgtggatgaaagcagaccattggactataagagttctcgctgtggttatgatcttcttctttacagtgatacggtaggttttttggacttcgggacctcattacctagtaatttcattcagggacatccactgacgaatacatagactggcattcctcccagtcatgctcgtgacactgccgttaccaccacaaatcacagttgacttaccccacaagatagtgcatgggtttcaaatgttcgcattctgggccttttctgttcttctgatcggcccatggctattctgtgtttacggtctcactaccaattcattaggcaggaaaaagaggattaagcgagtgcttgatgaccggacagccccgaagactgtggttgtgatgccagtatacaaggaggacccaagtgtcttgatcaaagccatcaactccgtggttgactgcgactaccctgcaaattgcatccatgtcttcctttcatacgatggtggcaaggtggacgagccgtatctccgggtcctcgaccatctcggtattccgatcacactagagagctatcctcagagcatcgactgcatttacaagggtgcacggatcacggtatctcgcttcaaacatggcggtaagaggcattgccagaagcatactttcaagcttatcgacaaggtttatgctgagtatttgaagacacatgacaatctgttcgttctgttcatcgattccgactgcattcttgatcgagtctgcttgcaaaacttcatgtacgacatggaacttaagccaggcagcaatcacgatatgcttgcgatgacaggcatcattacgtcgacgacggagaaaaacagcttgctgacaattcttcaagacatggaatacgtccatggtcagctttttgaacgatccgttgagtctggctgtggtgcggtgacttgtctccctggcgctttgactattctacgcttctcggcttttcgcaagatggccaagtattacttttcggacaaggctgagcaatgcgacgatctcttcgactacgggaaatgtcatctcggggaagaccgatggctcactcacctgttcatgattggtgccacggagcggtatcaaatccagctatgtatgagcgctttctgtaagaccgaagccgtccagacctttagtacgctcttgaagcaacgccgaagatggtttttaggtttcatcaccaacgaggtttgcatgctcactgacgccaggctctggaagcggtatcctcttctgtgtctggttcgattcatgcaaaacacggtccgaacgaccgcactgctctttttcatcatgatcatcgcactccttacaacctcaaaaaaggtggaggatcttcctgtgggattcatgggggtctctttggggttaaactatttactcatgctatactttggcctgcgtctcggacgctataaagcctggctttacccactcatgttcattgtgaacccgttcctcaactggatttatatggtctatggtattttcacagcgggccagcgaacttggggtggaccacgggccgatgctgccactgctgatgaccataccacgccaggagaagcagttgaacaggcaaaggagcagggcgatgagttcaacgttgatgtcgatacgttccgcaccagccttgtgcgacagagatctgttcccatccgcccatcggagaatgtggaaggtcgatttgcacctgccaagcagctgcttgataggtttgatgtcaatactgggcccgcgctcgcgcggatggtcggcgcgatgggaacttccgagaattcccagtaccagttaccttctctctttcgccattcaactgactctgtgctcagtgcatcgtcggattgcggctctagctcggttgctacaccacagaacgtggaaaacctcctgatgagtgaagaagaccagaagaagccctatcattctcgccaaggccaggcatcaacgagctcggtgagcctggatagccaaaatttggagaaccgcttgaatgatgctcttccggctttggtttctgcatccgagcatgataacctaggactcacccacccaccaggagcataccagcctggacgttttgaaaatatgcctccagcctacacagatcccgaaccaacggtgccgaacaaattggcagcgaaatgacctcaaatctcgtgacccacctcatgatattattgtctaacaagaacatacgttgagggtgcatgacgtcagtattcttcattttcttctttcttcctcttttttttcgtctcagcatcatcatagcttttcgaccacactattcttatgttttccagcgcaattttgttttgtctcacttctatagcttttagcatccaaaacacatcccagtctcatatgatgtaaccaccgatccaccgtagacgatcgatttttattctgccggccgcggtgggcggtgaaagtgggtagtctagcaatcgctagaagattcgatgagataccagaagagtccgaacgcccagtaaggtatatagaccagtaggagagagggaaatagagaatgaaagcactttctgacacattttacgttatccgtttataccccaaatttgaaattctttagttcggcgcctaaagagcagccagaccgcttgacacttgtcatcgcccctccaataatagtggagtggcgtgcaaattctcccctccgacttctctcacttttcctccttttgaatctcccatctccctccacctctctatctcctatatccccctactttcttccataatgagtgtcgtcggtatagatttgggtgcgcaaagcaccaaaattggtgttgcccgcaacaagggcattgacattgtgcgtattaccccacggtcttgatctggactcgcggtcttcttaggatgaaacatgacctcacaaattcgagaatttgcgctaactgcttgttgttgacattatagattgccaatgaagtctccaaccgtcagaccccgtatgtccccaaattccccgctatccactaaataactgacgactgatttgaattgttatagctccgtcgttggattcactcctcgcagccgaaacctcggcgaggccgccaaaggtgcagagatctcgaaccttaagaacaccgttggctccctcaagcgcctgatcggccgttctttcaacgatcccgatattgccatcgagcaggaatacaacacatgcaaactggtcgacgtcaatggccaggccggtgtcgaggtcaactaccttggcaagaaggagaagttcacagcaacccagttggtcgctgcgtacctttccaagatcaaggacatcaccgccaaggaattgcgcactcccgtctccgacgtcaccgtcagcgttcctgcttggttcactgacgttcagcgtcgggctatgattgacgctggtgatatcgctggtctcaacatccttcgtctcatcaatgacaccaccgctaccgctcttggctggggtattaccaaattagatctccccggccccgaggagaagccccgccgtgttatgttcgtcgacattggttactccgattacactgcctctattgttgagttccgcaagggtgaactgaacgtcaaggctaccgcctacgatcgtcacttcggtggtcgtaacttcgacaaggccctgaccgagcacctcgccgtcgaattcaaggagaagttcaaggtcgacatccacactaacggcaaggcctggacccgtaccttggtcgccgctgagaagctcaagaaggtcctctcggctaacgcccaggcacctttgagcgtcgagtcccttatggatgacgttgacgtccgcgctatgatgaagcgtgaggagctcgagctcctagtcaagcctctccttgatcgcctgaccgctcctctggagcaggcactctccgaggccaagcttcagattgaggacattgaccagattgagatggtcggtggctgcacccgtgtcccctctatcaaggaaaccctcaccaagttcttcggcaagaacctgtccttcaccctgaaccaggacgaggccattgcccgcggttgtgctttcagctgtgctactctctcccctattttccgtgtccgtgacttcgccgttcacgacattgtcaactaccccattgacttcacctgggagcagtcccccgagatcccagatgaggatactagcctcactgtcttcagccgtggcaatgtcatgccttccaccaagatcctcactttctaccgcaagcagcccttcgatctcgaggcccgctactccgacgtcgcggctatgcccggcaaggtcaacccctggattggccgcttctccgtcaagggcgtccaggctgatgccaacaacgacttcatgatctgcaagctcaaggcccgtctcaacctgcacggtatcctcaatgtcgagtccggatactacgtcgaggatattgaggtcgaggagcccattgaggaggagaagaacgaggacgagatggacgaatctaaggatgaggagcccaagaagacccgcaaggttaagaagcaggttcgcaagggtgacctccccatttcctccgccaccggcggcttcgaccaggccaccaaggaggcttggaccgagcgcgaaaacgctatgtacatggaggataagcttgtcgccgagaccgacgagaagaagaatgagctcgaggcctccatctacgagctccgtgacaagattgacggcgtgtactccgagtttgccagcgaggaggagaaggagaagttgaaggccaagctcacgaccaccgaggttagttttgaatcagcatctatcaataactattgtgatcaagcgtactaacacatcaatttaggattggctgtacgaagatggtgaagacaccaccaagtctgtctacgttgccaagatggacgacatccgcttcatcgccggccctatcatccagcgctacaaggagaaggccgaggccgagcgcgacgccgtccgcaaggccgatgaggaagccgccgctcggcgacgcgccgaacttgaggccaagaagaacgctcagggagattccgacatgcaggatgcccccgagggcgaacttgaggagcagtagatgcattcccacgatattggaatgatttgctgatgagttttcttatttttaagggttgggtatggaaaacccaattccaattgcgttttactctgatctagcaggttcgctaccaatttggatcggggtaactcgccgcgttatgacgaaaaggactttttttaaagagatgttccatggacctagagatttcaatcggcttttaatcgttggccacctttttttggccacttttttgttctaatggcaaacggttatgatgtagatcgttcttgttccctggatgtttatgaatagatgaaaatacactcaacgcctttgtcttcattgttgagatcctgtatgaatttgatatcaacatagctcattggcgaagcgacaggtccctatcgtaataaacttggactttatacagcacaccaaccctaggccaacagcctttagtttgcacgtattgtccttttcacagtcgtacatacagtcagcggctgattattcccagcagatatttataggcgtctactatatatatatatcacataacaattgaagtatacggagacacaagcggtgaatctcaaaagccaataggactaaagtccctaatggcgctgacactgcgatactcattgcaccactttctaccccgctctagttaactacagtgtactctgtaattaatacatcaacatgactcgggaaccttgggagcgaccatatataaataaatcacccaaggatatggtgatgcacagatttgtatggcgtgaaaagcttcattttatacaaccacgcagaaccgggcacctgggcagcgtacattgattactatgcacgtgtaatagtaatttaggtattttaagttttctgctggtaaaatacggcatttaggcatcaaatacccccaaatctagggtttgaaccatgatataccgcttcgtaactggccctatcatggctctatgcacctcaaagacggcctgccgcagatacgatagaggtaaggacaatattccacagtagaagcaaacttcttatgacagtcgcatcaagcaaagttaagaatcctacccagcttgccgtttgttattgtgtcagcctttcttattcccctctcctctcacctgttcctctcttgatcttctccctattcttcttcgcctttttgatcagtgatttctcttgcattgcaccagtcctccaagttccagtctatcttgagagatggcgcaagatcaagataagcgaatgatcctccggcttctgcttgaggatttagatgatctcgaaaatagacagaaaggaaaacaaggcacaggaaaggaaacagaccttgaaattgccatctcatgcttgagggaagatattcgggctatgcaaacttccatcgacgacgagatattggcgcttagcacgagtactgcaatcgccactgaccagaagatactcgcgtctcttcttcgcgaggaaagacttgctaatcaggaccaccaattcgctctcgccctgaacaaaggaaccgctaatcgtacgaatgccttggcaaacgatatcgtatcgtcagatgacgatgacgatgccgtttccattgtcatgggggatctcatgggccggatgtctgtgagtggcagatcatctaacaacggggaaggctcatcatacatgcgttcatctcgaggaaccaacttcatgagtgaatgtgcatcctgtcttacaaaggtcgagtctatcgtgttcaagggtgcgtgcggtcacgagttttgcctcgactgcgtaagacagatgttcctcggtgccatcagagacgaggaattatacccgcctcgttgctgcggcaatgtcataccgcctggtgttgctttgaggatccttaactacgaggagcttcgaaatttcagtgaaagagcccttgaatggaccgcaaaagatcgcctctattgcgctgagccaacatgttcgaaattcattcccccattcgctatccgagacgagcacggcacctgccccgaatgtcaccagcggactcatgtaccatgccgttccctcgcccaccctcgcgtcgattgcccaatggacgagactcttcatgctgtattggaaatagcggattctcaaaactggaagcgatgcttcaattgccgaaccatggtagagttgcacgttggctgcaaccatataacatgtcggtaagtgagaaacatcccctacaacaaacaatatcacagtacatgagaagaaactaatgatttgtagctgtggccgcgaattttgctatgtgtgtggcttggtttggaaaacatgcgagtgcccactttggcacgaggacaggctcgaagaagtggcaaatcgggcggtacatgaggaggtcccggccaacgccaataaccaagtccgccagatcgcatttaaccggatagtcgatggcctgcagcagcatgaggacaacggctgcgagcaccacaggaactcgcaatgggttttccgtaagactggaagtttgcagtgtgaggtctgcaaccattatatgcctgagtacattttcatgtgcagaggttgccggattcgggcttgcaaccgttgccgaagacatagaatgaggtagttcgctgcttttgcacggcatctcgtgaaagacagctgagaggcatggggttactctgcaagtcattcataccagtctgcttggtgggagtagaaggaagggtgccattttagactgtcaatttactagatttgtctttgagcattggggtcctcgagccgatctacttgaacgaagatatttgctggcagtttgggcgtaattcttattggaaatcaaaacgcacttttgcgtcattcgactagcggagagcggagataatacatgttaagatttgatgtgtatagcacttctatcaattacctcgttagtttctgactttgccttactgcctgaggcattcacattcttgatatcacgtgctagctccggcttatctccgtgctgacaaaacctatcgccgtggaatcaggtcgaattcgccagcgcctgcctattcgggccatataagcagtttccttatcgcagttcttcactcacgagctcttctctcacgatttgctgccatacgatcgcacatatacttgtacgctataatggactctcccaaggagctaaccgtccaccaccatgggaccgcgcatatcattcaagttccagactcggcaacattacaagacctctcctccgagatagagcgcgtcctgaacattccggtcgacaaccaaaagctcctcatagccccaaagcctggaatgcagaaagcgcctttcccaccaactctcctcgacgccattctccaaccctcctccccaaaattcaagatcaccctcctcggcaccccggccaaagcaatcgccgatctgcacgaacaatctgccagcgaacaacgacgacaagaattacgtgcgtctgccctaagtgccgcaagacgcaataaacgaacaccgtcgtcccgtagcggcggcatccacaccatctcatcttcaagcaacaactacaccttccaccgcctcctcccactatcatacctccccaacccagatcgctccctcgacttcctcaagcgcctccgtgacgacccaggcatccgcgccgcaatgacaaaacacaagttctctgtgccgctcttaacagaaatgaacccggcggaacacacgacgagcgagtcgcggacgctaggtctgaaccgaaatcaaggcgaggtaattgagctgcggttgcgaacggatgcctatgacggataccgtgattaccgtactattcggaagacgctgtgtcatgagcttgcgcattgcgtattcgggccccatgaccgcgacttctgggatttgacgtcgcagattgagaaggaggttgatcgcgctgattggaaatctggcgggaatcagttgtctagtcaggagttttataatcctggtgattgggatagtgcacaggatggggaggagtttgttgatgagtgtgggtggactggtggggagtttgtccttggtggattgcaaggggactcgactggaggccgaaatgctgcttctggcgggacgttgtctcgtagggaaatcatggcgcgcgctgcagaggagagaatgaagagggagagtcaggccggaaagcaagatgatgccaagtgatatcatggcacgctatgcttttcatgatttacgagttcttgcttttgacctacatagccgttgataccatatttttagttcgtaattaactcatttctgtacattgcagactgtatattatcacttaattataccaatctagatatttacagctgctcgttaacaaagagaccagccataccctgaccagttccaatacacatggaagtgaccagaatcttgctctttgtgcgacgagcctcgctcagaatggtcgcgatctggcgtgcacctgttgcgccgagagggtgaccaatggcaatagcaccgccacgagggttgaccttggcgtggtcaagaccaagggtattgacacagtagacagccatagaggcgaaagcctcgttgatctcgtagatgtcgatatcattcttgtcaagctggaacttgctcaacagcttggggatagcggcagttgggccgatacccataacgcgagggggcacaccggcaacggtagcgccgcagaactttgccaggataggctggttcagctcgatagccttggagcggcgcatgagaaggacagacgcggcaccatcggtgacctggctggagtttccaccagtggacttgtcaccgaactgcgggaacgcagggcgaatcttggaaagcgactcgaaggtcgtaccgggacggataccatcatcacgggacacaatcacctccgtaatctcgccagtcttgggatccttaaccttggtaggaataggaacaatctcgtcagcgaaccaaccgttgttctgagcagcctcagcacgacggaaagactcggcagcatatcggtcctgctgttcgcgggggacatcgaagtccttgccgatgttctcggatgtctggcccatgggctgcatgcagtcggcagcctcctggttgcgcaggacctcctcgttgaatggcttctccaggcgttcgccaggagcggacatgagctcggcacccatagcgagaccgatgtcgatggcgcccatcgagatctggttcgcaatatcctgcaccgccttcagtccagacgagcagaagcggttcactgttgaggcaccggctgtgtgggggatgccggcggcaagagctgcggcgcggaccatgtaggcggccttgacttcgttgacctgtctttgggttagaatatgccacctatgagtttatggaggaaggaaagggattggacatacgttgccgaggcagacatcctcaatcagagcagggtcaatctgtgacttggccagagtctccttcaacagggcgtagaggagatagtccaattctgtgtccttgaatccacccttacgcgcccgggtcagcggtgtgcggattgcgagggtgatgaccacatcgtcggggttcttctgtgtactgtgtgtgcttgttagactcatgacacacaactgagtttgtctgaagacttacatagcagcgaggccgttggcggcgccgggcttgaggtggctcaggagtgagcttaaacgatcagcagccattatgtatgaaggtttagagattggactaatatatcgtcagtcttgtgcttctcttctttgttgaagacgccggtactggcatggaagttttcggtcttaatgcggggaagcttccacgtgcggagattcgaggagagtgaatgcaaataactcaggcactgggagaataacttacagactgtacagaattaggatagagacgaggaataattcaagcaaaggggaggaagaggagagagttaaaagaagtatcaagaggaggaaggtcgacgttccggccgaggctgccgaggttcatttcgcctgtcaggttatccggtcaataagtatctagtacttcagatttgcccagaactactaactgtaggaagtaccaaatactttaccaagatctatttccagttttatggggttggcttgtggagatgcctaggtaactcggtttgtccgagtattattggaactttggaatatactgtaacataaaccattcatttctagtgtctagataggggtaaaccatgctattatttcgttagttctggcatacttggccttctactcgttgcccgttctgggatgcgatattccgccacttgttcgatcgagacgttgtcgctcacgtcgacagtaatcagttctaccgatgtgtcgatggaatctatatgtatacactcggagagatagctatgtgttgttataccttcttgatgatcactaatatgtgcccaccattatctcctggcgcagccaatcctcaaatcttccctcgtgagctttggggtcagtgtcttcccagttataagaaccagtgtgatagttcaaaatctcgaaatacctatggacgattagcacagatcaatacgccgcagatggggaaaattcatacattttgctcttccattcatctgtagtcatttctgaatccaacaaagacaagtcaatttgtttctcacactcgggttcgtcattagagtccgaatagctcgaaacgtatggatcgcttagggcatcatccgccgtgattctcttttgtggatctatatccagcattttctccaagagatgaacggctagcgaagtcagtatcattggaggtagataaatcaggagcatttgatatcaatcaagatctcaagggcataccttcagggtcaacatctcccaatgtagctccaagtgaccggggttttgtttcaggtagagagttcacaaaatccatcgtctataatttgtagttagcatcttcccatccgtccctaaaccggccgtttagaagtcgatcatacaatgtcgctgtagactgtctccataatctctctgggcggcttcccaaagatctcagtgatcagtttgaagtgatgcacattgtcccttgccggtaagaagacctttcctaggagcatctctgccagaatgcaaccagtgctccaaatatccaccgcgtaggtgtatctctgccaggtcaacatgatctctggagctcggtagtatcgtgtggagacatagccagtcatctgatgatcttgttctcgagctagaccaaagtcacaaatcttcaagtcgcagttctctgtgatcaaaatgttgctaggtttgacatcacggtggatgacaccagcagagtgaatgaattttaaccctcgctgaaatagtcagatacactgatatttctggatcactcaggcagacataccagcagttggtaggtgaagaactgggtgaacctgtcctccaatggctttgaccttgattggatcaaatgatgaaggtctgtcatgcaacaatccatcacaatataactattccaacatggttagtatgattgaaggagatagacaagtgatttccgtacagatcttccgctggcgagatgaagatgtccgtcatgttgatcaactattggcgattagtgttgtagctcatacttcgtctcttttctacacatacattatcatgttttaggttgttcatcaaatgaacctcgcgatatgtgcgtttgacccgggaagagctttcaaagggtttccctatcttttttatggccatcgttcggttggccattgaatcatgcgccgagctgatactggtggttagtggtcttacagcacgaatagaatatacgagggagataccagattaccccaaacgcaccaacacctcgtgctttcaagtctgtgtatctctcggtagtttgaagggtggtgcccatgattttatgtgtgatgaatgtagccatgcttgcaaggttgcatgtgtgaaagttgaatggattgacggaatagtgtaagaggacaaaggatccccggtatactataaacgataccgcattactataattagtcttccaagatcccaatgttcttcttcccaggtctaggccgtgtggtcgttacgtcacaacgtggatgttcccatgtggttgatccattgtggttggccagttggccgttttacatcttgatttccacgtatccatgccgagccggttataacggattatcatctacatagtatatatgctcaaagtagtggacgtcacctagctcgatcccaatcaccagactctctttcgcaattgcgtcaatcatgtcccaggtgatcgaacgcgagaggcaaattacgatctttgccttcgaatttcctttgctgctcggtacaaaatgaacaatgcctttctagaagtccagaataattggaaatttaacggaaccattggtacttcaattgaaatagagcataaatgtaccttgtatcgcattaacaaattgcagctaagctcaaatctaacgccaaacaccgaatactataccgaaagttccccgagccagtaaagcccacccattgatccgtccttgacggtccgagtgaatcagagcaactgatgtccagcatcctcgttgctaattacgctacccacgtcagaccatgccggagtagccaaaccaccaacagatcgcccatcaaggtcactaagagtgccatctgacgtttcatcttcaaatcctccgacatggctgaaacttccagcggtcgaaggagcggccgaaatctcatcgtaggactgaacgctctcgtggccgaaaccatctagctcgacaaggtgatcactttcataatttatgttgtttgccgcatcagggtgcgcataatatacctgctgatggtcttctgtgtggctggaaccagaggcagacaagggagagttaggagagaatggatcgaaaaggttatccccctcgggtgcttcagaccgaggcgtaaactggatcatagattcggaaggatggattgagggagcgggtgaggggatgtcgacatgcagctgattccgacccggtgtagttgaggattcggcctcagttttcttgacacctcggcggaaaggctccgaagtccccaggtcaactcccgttgagttagcagtaaattcttcgttggaccgagcattgtattcgtggtctttttgtatacgcagattgccctcgctgtcgacgagggtatcaaagctattatgaggctggcctggctggctggacttccgtcgcgattcaatgaccgattcaatgagctttccccgtcgtatgatctcctcacgagcaatccgtctgcgttcttcggcaacctcgccggtctcctcagtcatggaaatgtcttgccgcaacgctatgtcttgaggttggatctcatcgccgaggttgtgcagagccaaggcgatcttgcgccgcgagttggttacccattgttgaaactgaggcgactcatacacggcgatgccagctgctacaagcacagaaacagtaatgatgattcctgcatgagagtttagcctcatcgtatagagagtggggaactgataaggccgagtacacggctcggatgatccgggagggaaatgtagaagtttagggaggtagaggaccataccttttgcaagtggtgctggcataatgaacccgaatactgtacttgtctttcctaaaagtgttttcgaaactcaccaccgtcaagcggagcaagatgattcggtgatggatgcctggaccttatccttgcattatcgcgcgtgaccgggaaagcccttatcattggccctaagtacacaccgctttgggtaaagttccccgcgtcaaagagggacgtgattgcaagctcccatctcttgactcgattgatgtacaattgaacttgaacgatacatcatgtctcgccaattttcgcaggcccaacggccgttgtccctcaccgaggagcttgagaaattggaacagtccatcacccttacaatgcaaggtagggtagagaagtaaacaaaacagtccagcagaccgctcatcgtcctatcttcgaacagagatcgaccacaatttcagtgaagctcatcggatagtcactacgagtatactgcctctggtacagcaatataccgagcattcacgagatgtctgggaaggttccaaggttagcgccaccagcttatacagctatagacagattggttgactccctttagttttggaagcaattcttcgaagctagtgccaacgtatccctatccggctacgaagaaagaaacaccgatgaagaaacgacgcaggaccctacagccacggaggaagagttgtccgccgacataactcaaagtactaccctcgacgagacaatgtccaacgagacaccatcttcgcagcgtcatgaaacaccccgccgcgatcaggcagacgatcttgatctaacagaactcggcatttcttcgcacagcactccgcgtgctccgggcggccaccaccaggccgacgacgacataacaacctcctcaatggagtactcgtcctcttacgagaacctaagaagacaagtcaatgaatccgaacccccattcgacctcccagagtcctcgaccctcccatccactccaggccgccagctcttcttcccacgcggcgtctccgtcacaaccccgatgtcatcaccattccttccacccgcggagccatccacccaagaccgtcgataccagaagacctcagacccggtactgcaccaaatgctcgacaagacataccgggtgcaagccacgccgctcggaaagggatttcgcaatgtgggtggcggcacgaacacccgaccaaagttcaacatcaccccaaagccggccgagtctacctccaagtacagatatgacgactcgccgatttccagtccagagccagaggcaccacagctccactcggaagtcttctcatcccccatcaagggcatcgataccccgggcacgaaccgcaagcgacggactagcagtaatcgcatgcgcggtattcccaggcctggcatgagtgttttgacacctgctaagaagtctgctggtaagtcagctatgtgggatagtgacgacgatctggattacgacgatgaggaccttgggccgagtcctcctaagacaatgcagtttcacattccgcagagccggttgatgcgaacgcctggtaataaatcacttgatcctatgtttaatactatatccatgctaacccccttcgtcttggtagcaagagaggcttctaagcgcattgtgaccgatttgctggctacggctggagctggggagattacagatgactttagcgacgatcaaagtccaagtgtgatccgccgcatggagcacttggaggatgaaactttctaaattcgccaagaaataaggctgactataggttcttcacattgaatatgcatggctttttttcggctacattccccacattacacgaatacccatgaatattactatgacgtcattattgacgaatgccagattcagtcttcagatatctattagagtagagaaacagagataagagggcacatcctttagtataatcacacaagtagacacagtaaaataaatgtcactttttggactgagagagcccttgcggcatgaacaagaagaaaaaacgcttaagaaatcatgtacgggggggatgaaggtcaagcgagcaatgtcatcgccccgtcccatctatcattatggtccaacagaggttgcgggctctcagtatgaaatagaaagaaaatgggcagcgatgtccgcgatggaccttggccaatggtggtcatggaggggatgaacaagaagcaagatagtgcatctaggagctcttcttcttgttcttggactcggtgtcctccttctccgtcttggagtccttctcatcattactctcctcaggcttcttcttttgttcgtcttcagcagccttctgcttctcttcatgctcatagagagaaatgtgcttagagctcaagcgatcctcctcagcagcaaccatatccttccagagatctccctcattattcgaggcaccctggtgggtaggctgatcctcctcaacatcctcaaaccgaggcttgcccgacggattcgccttgttcttcgcgtccagcaagccacggccgcgacgctgatccgagatctcaaacgcagccgaagcgcacagcacacccagcgtcagaccctgggcatagacacgagcctggacgagcttctgctggccgctgaggccgggaatgcgaccgaccagggcgaatgagccaaccatcgaggcgagccaggtggcggtgataatcttgtatttctcacggcgggcgaaggcagccgcgcggtcggtgaagctgagtccgcgggattcttcggcgcggaggcgctcttcgcgattctcgtaccatttgtatgcggcattctgctcgttctcgtattcgcgcgaggcgtggtcggccgcgatgataccggcgaaagtacccgaggacgtcaccaggaaggccttcatggggacagttaggttgttgattgtgtgatagcgacgtgaagcaagtaggacacctgctattccggcggcgagacccagcacgccaccgactgtgccgcctttgaggacggagctattggggggttatcagtatgggctgttcatgggaagaggttgcagggctttcgtaccggtagtgggcagcttcttcttctttagtaaggatcttcattgtgtaaaatagtgtatttctttagaatgaagtaaaggaagaaggtgaaatgttcgatataaaaccaaaaaagcaaaggccggatcgcatgacgtgggatcgcgggatctgctctttttccggcgttggcccccggccatcactcggtcttgcacggaactgacttgccttgattttgtggctttttttggctttttttcttttctgacctatttagaatttaattggcttctcattggctgtttccaatatgaatttcaattgataaagattctgcttattccactcggaatgcgaaacgtgacacactcccaaatccctggccccgattgatcccgaaacgcccaaacaccgcaaatagtatctcacataacggaacaggccactgccattttgaaaagaatttactggtaccaaatctaccgacgagacgccttgcgtgcggcgacctggcgggcttgcatcttgcggaaacggtcctcgccactggcacccaaggggcgcgcaaactgactctcgcgcacagctgtctggcgcggaaccacagtatagctgacgtttgtacgatcgacgcgagcacgattgagaaggcggggagggagcatctcgagggcgcgggcttcggctcggatctcctcggcggtgggaggtgcgcgcctgacgactttcctataggggtgttagtgcgtgatagggcggttgtaaaacagtgaacatacgtaggatcataatcagcctcctggtagacccgcttagaataatcgtcgctgcgctgcagaataggtcgtgtccactccgctagcaacttctctgccatttccttgatgcgacgctcggtgcgcttgctcttggtgtagaaaacaaccacttttccaatgccactggcaatcaaggcatccttgttgataggaagtttggtaatggcggtcaataggtcgcgctggatgttgtaggcgggcatcgcgccatcgtccagaggctcgaggaagaatcgaacggcttctagtaagttaatctctggatcgaccaaggcgcttgtgtactggttgcgattgaggagcatgatgacttcagggagcagcttaagcttgtgcatagccggttttccttcttggcggtttatcgcatccatttgcgctgcgtgggtcatgcgcttgcgcatatcctcaatttcagcatctgccatagattccaaatcctaatatgacagtcagtaaacgtaggtgggtacctgtcaccaggcgcaacacatacaatgccgtcctgcttgcggaaacgtctcttcgccggctttttcatcgcctcgtccatagcacggtcaagggctcgccgacgtcctgatgattgaaaaccagttagtacaaattgtgtgcggcgggaaaggagttgccagtaaagagtagcacatacgggtctccgggtcaagggtctcctcgtctgtctctggcttatcctcgcgctgcttgcgctcacgtcggcgagatgagcctccttcgtcgcctccctcatcagctcgacggctctttttctcgcgacggccctccttccggcgcggacgactctccccatcctcagtgcgcttgcgcttgtgacgaccaatgagtttcaagttatcttcatcaatagcaagttgcgggcggtcctcgacatcgacattctctgggtcgaagttgtcgaattgtgcctcgtcaacctcggataaaatagactcgtcgtctgaaagtttgtcgtcgtcgacttcgtcgtcatctccaccgtgtagctcgtcatcggcattcaccgtgacctccttagtctcagcagtaggttcagtgacgttctcaccctcgttgtcgccaccagtaaccggggttgcggcttgttcgaggacttcgggttcgggagaggcggcaggcgagacagccttgcggtccggtgaagcagacatagcggttcagatggcaccagaagcgaaggggtagattaagaacaaagattcaaaggcgtagaaatcagttaggggggtatcaaacaggtccagtacgttatctgcctaagtgatcccgacggttctccgcaaaatcaaccggttttctgcggattggaccaattcagatgcggtgtggatgtagggattgaagagaggagccaacaagctgctcacagaattagtcgatagaatgtaaatggatagagagaggggagacagtgaggcaaaacctcaagagaaggagagcggtggtctgtgctcccgtgatttatttctccagtccgacttggacatcctcgtaactacaactctcacaacatctattatctgaactctctttcgttccttacttctttatcatattcaaaatgtttgcaccgggtatgttcccagttgtatatctcttcgctctagcacactcgaactaacaatataactctctaaggccaagaacagatctctaaggaagagctcaaggtcagtttcaagccatgacctctgccctaaatagcatctgatactaatattatttacaggctggtgagattgaggccttccagaccgtccagatggctattgccggtggtttcctcctctacctgtgtaagtcgagtatctgaagccttgaacacctcgagacgagtcagaaaagagttggggctgaaaactaacattgtcatctaatatatagcccccttcgccgtcgaattcgtccgcaagttcctttaagccggttggcccgtcttccgctcctctttcttgctcttcccggactgtaatcgacgaatcgctggttatgatttcccgatgatatgcaggagaattgaacatttcattctttcccctctggcatagctttttctactgcccaaatcggacaggattgagcatgggcacctaattcatggaaagctcttgaagctcatatactacacattttgggtctgctgggcagtgtcagttggatgatgtattactattgtgcataggctcgttgtcatttgtggtttatgagatatagagcaaatcaaaataagatattgcattatatcggaatctaggtctcgcctggctgtggcaaagtaatgagtcaacatagcagagtgggggagcggtttaaggcatagatatacactgactagggactatctgtggatagtacatgtcattacgaagacttggcgagcaatgctcattcaaagacacccaaaatggaatacggagtgttcagcaagaaatttgtattcagatatgcattacaatggcctgatccccgagaacgccggtaccccgatgaccgtagacattaagtccaaacatgtgaggaaatgtgaggaaattgagaatcaaaatagcacatagaaagtcatagagcaatgctctcaattgccaattgctttctccaccgcgttgaagtcgttcttgatggactccatctccttctgaagatactgaatctgagagtgataatcgtccaaaatctggtacatacggttagcgaactcttccgatactgaggtttcacaagctcgggactgccgaaccttctttgctgtcttcaatgtctgctcatcaatgtcatcctctggttgtgtcacgtttaccccggcacgatcgatttccacttgcaatcgcttggagtgttcgtggatggccaacatacgggcccaaatttcttcagcacggccattgagagacgggtcgaaaacggcacgttctagctcaacaagctttttcttcaactgttcctccgcttcatccatggcataccctctgttgcgaaggatctgtgtcttagccgcaagggagaggcaccgtttgctcagaatgatgtgtttccgacggcagtcggcgatcttgacggaaaggttgagatcatgcttcgagagaagcccggtcaagcaatcgttgatctcgtgcaggcgcgactgcatcatagtgaggaagtccctttgtcgctgcgcgcgcttaccgagttcccagaagcccttgacaagcacagggacatatcctggacccggtcgcttgcgcaaagcctcctcccactttgcatcatcgtcctcgggacccggttggtagaaaggagcggcctcctcgccgacattattgtacaggtaggcacggaatggcgagctttggctgggcgggtcccacttatctttgatgatggctacttgcataggaacagtccggtgcactagaaagtagtcttgtcagtaatggttcgtagtgaatgattacgcaataggctcacccccagtgatagcacgaccaggagaccaaaggcttgacgatagagaaggctgttgctgttggggttgtggggttgtcatcgtgttctggccgaattgcgattgctgctggccgaatgcatttgtttgttgttgggggttggaacccagaccaccgaaccctcctagtgcagctggttgttgtgcttgctgctggcctccggagaagaggctaccttgcggtttctgtagcgaggagccgaatgcgcttccttgctgctgctgctgttgttgctgaggcgcggcgcttgcgccgaacgcactcccgccaaatgcattggttgctgtcgcggctggctgttgttgggtctgcccgaatggtgtgctggtgttgggttgggctgcggttgtagaggtgccaaagagagacggcttcgctgcagtgttgccgaacatgttgttggcctggggctggtttccaccaaagagagacatgatggcaatcacaaagacaaaaaaaaaccacgatgaagagagaccgcgtcaatggatcaataaatcgctagcgcagctagattaagagcgctgaagggaaatagaaacaagttcaaagcacatagtctagagactggggggtgacagtcgaaggtgagaaagctgaggggttcttcgatggagctcgaaggccgagaaagatgagccggagctcgatttgtttgtgtcacgtgatgtgatattgttcgcaaaccgcttaaatgcatattgaaagaaagagttgaatcaatagtgaattagaattgctttattgttctatgttattgtcctaatggatttttcttattgatatatccaataaacaaaagcaacaactcatatacgccctattccagcaccgcacctaggcacctcaggtgatatattacgctgacctaagcaaaatccagacagccaatcaccgacgagccaaatttcattccaccgcaacccgcagctctcgactatcgatctccaagtctcgcctcaattgcacctctttcccctcacagtcgttctgacaagccaccgtcgccatggcccaaagagatgctcggtatgtaccttgatctcaattgcttcctctccgtatagctcaatgtgagacgctaactgctatcccctccgcgcacagctttaaccagactgtcctggtggacaccacgcccatgcccgatcacattcccaaggtggaagagatcggtgccacatctgcacccctgatgagtgcatcctttttcattggagaccgctgcaaggccttcaatgacgactacatgaagtgcaaggacgaggccaatggccgcggggagatcgactgcttgaaggagggccggaaggtgacgcgctgtgccgctagcgtgtatgttgctttgtgatttacctttggatcgagaaggagatattgacccgtcacagcatcaaggacatcaacaccaactgcctcgaccagttcaaggcccactgggaatgtctcgagaacaacaaccaccacctatgggagtgccgtaggcccgagatgcagcttaacacctgtgtcttcgagaaattggtatgatatacgccttcttgctctcgatcgcctatcacctcgcatccattatatccgctatcactcccggactagagctaacatacacttctcttgtttctttagggcttgaagaagaccctccctggcgctcccgagaaccaagttcctgttcacttgcgccccaagcaaaaatacgcacagtaccccggtccccagtggtaaacactgtccctgtttactttgtcctctctagactcaccctgattgcacccttatccttccctctcataatctgggcaccgtcttttttctatagcactgttttatttggatgctcgaccgtaaatccggtctatgtttgtgtaaatatctcttggcatcatgaatggttacatgattttctgctcgatctccaaatctccttgccttgctcacatggcatgcacggggcaatatgttttccaacctattgcagtgtgcaatagcatattctcgagttggtaaagtacggactctatagcccgctggctctcgtgcaccctcggtttgatgcctgatttgttcactgagcgtgacctgaccgatccgacttgcttactgagcataaacccaataaaatacaacgcgataggcccgtccaatgcagtccttcatcaacgctcttgtccccttaacaaagggctggcgtcatctatgtggcggtccagccctggttgcttcgcctctaagtggaagggaaatgctgctatcccgcggctatggcactattcagtctcccatccacgataccgtttctacatagttgcaagaactatccagccctctggttctacgatatagacgtcaggccttttgctggatctgaagggtgaggtagaatactatggaactaccatattccaaggtttttgatcgagttctcagtacttgattcctggagcaacgagtgtataacggggatatacatgtacatttctacaaatcaagcccgtcaaccgatgtctagaaaacgacgcggtctacacacttaatcaatgactcgatgtatatatatctattcaggtctacattgttctttgcccttcaaattgccaaatttttctcactttattgtcaccctgttctcactttgttctcaatagacaacctcagcccgcccttctacagctatttatttcgctttcttccagttctcatatcttctttcacagacagccctctgtgatttttattccttgcatctacgctatgtccattgtttctctggcatatcgttcgccactttcttgaacagaagacttgacaagaatcctgactcctacgaagccctcgcagctcgcagtgacctcgttgagtctgccagacatccagaagatcatcggtctcacctggttgcagatgatgagttcgactttgttacacctgtccccgtcccgcaaggctcgatgtttggaaatatccagaagccccattataccttcggctcaagtgcctttgggcagccccagcagcaacaacagcagtatgttagctcgatggactgtacaaataaatcagctaccctcagttagaactctagttggaaaagccggaccgcactcatggcgcaaacgaagccagtatccgctgcaagctcgaactcctccttgtctgcgatcacgatctattttccatctttgaacaaatctgctcgacccttgaacattcaaatggaatgtacatgggcgtatagctctgcgaaatggaaggggaagacatcgacttaaacattgctatcatggagaccaagagacctaccagttgttccgcagggattccgcattcccatcccgacccattgctgctctggtccgaatatgattgacaggcaactgattgccatgaatgtcgatgatgagtgcctctcattgtcataccccggcggaacttgcgaatatgatgatgcccgatggtttcactgtatggcctcttatgggatcaacagcgagctttaggaggccattatggattcaaaatttcgacacatccgcctaaccgaaacttgcaagctctggcttcaggacactattcacttacgataccgggctacaaccccctttaccacggaagaactggggcgggtcacaaggaggttacaaaacatggctctagagagctgagaaacagaaaatactggaggcttcactgtgctggcggcttcactgtgctggtggcttccattggagtacagaagccgtttgacaattccgaagccaagaggcaagaagcttctcgtgagcgtgatcttggcatggtatctaaaggcgatggaggcgtcccccatacacgcccagtcacacaccagggagggatctggggggttctctattccttgctcttcttatttttacccatggcccttcgctagtattacttgatcgaaatacgagtctatctatctaggctatgacccaattaatagatagtgagacaaattctctgcttctttgatatcctaacccgtagcccaaaatctgaaaggagtcggcagatgacagagtattatgctcttttgggtctggactgagcgtgctaggttaggaaacccatatgtaggtaaccattgcaacaaataaactagccacctttcaccctgacattcctctgcaggaaagcttgtatatattggctctagattacccaggcttacgcatgcactgcagagtctcaccgtgtatataacatgttctggctatgttttccttccgatctctgactttgtccaacatatgaccaccgagtaatatgggtttttgttcttgagagctaacttaacctttagagaattggtgatagtatacatgtaggcagcgtgcgtgaaacataaaggttaggtgggatataagttcgcttattcctaacgtatctatggataatattgctgggcatatcaagctctataattctattacgattagctttgagtagatctgatctaatgataccttctcaaaatattgatctggaccgagcgcttttccgggctagtacaaaggcttagcatcaaccgttctgcagcgtctgaactacaatgacagattgttaatcgttacattctataatccgaaggaatccataatcataatcatccttcacctgattcgattgcaggggtttggcctgttggtcaatgtgtgtaattgagccctaattccggccctccgatatactacctggtgtaactatgcctttgagataatccgaaacatatctaggttggtttctacttaggttcaagagtccgcttgtcacagaatgcatcaacagcattgactggtcattggagtgtatctgaagtatttcggaatatagaaagcatgtattaaatccggggatttagacccaaggtatgaggaaattacaaagagagagaggccaagagtacgcttagatctagatgcacgaatagcggacctccggcatctatctatagatacctcgagaggcataaatgcaggtatcaaactctccaccagtccgtgcatgtgcgacaggaaaacaaggatatagattattgatacaaaagccgcacttccttctctaacgactcttcatatcgatgtactacttacatctatagtctgagccatacacgcaggtagacatgaagtcggcaatattcttgattctatcattatggagaggtgtccatcacgtccaagcagcggccgtgttcgcccacttcatggtaaagcccttcaactacgatctatatctccgctaacctccaccaattccagctatacaactcggagaacttcacggtctccgactgggaaatcaacatagcagaagcacaaaaggcccacatcgacgcctttgctctgaacatcgcatacaacttcccaacaaacaaccggtccctagcgaacgcattcaaggccgcaaataccctgagcttccaactcctattctcatttgactacgtaggcaacggtgcctggccagaaggcgaggtgatcggcctcctccgaaaatacggaaacaacccagcctactaccagcacaacggcaaacccttcgtctcaacctttgaaggctcctccaacgccacagactggaccacaataaaaaagtacacagactgtttcttcgtaccggggtggtcagccctaggcgcgaaggaagctctcgccgtcgcaccaggcattccagacggcctattctcctgggccgcatggccggaaggcccagacccgataaacacgtacatagattccacgtacatgcagtggctcaaagacaccggccacctgccgtacatgatgccagtctcgccgtggttctacacgaacctgccaggctacggcaagaactgggtctggaacggcgataacctgtggtacgaccgctggcagcaagtgctatctctcaagccggagtttgtggagatcatctcgtggaacgactacggcgaatcgcactacatcggcccgctgcatgagggttcatatgcgaccttcgagatcggtcatgcgagctacaactacgctaccggacacccccatgacggctggcgtgacttcctgcctttcatcatcgatgtctataagggtgcacggccgaatgtcacgactgagggcgtcacggcttggttccggctggcgcctgggaaggcttgtgccaacggtgacactatgggtaatacgaagacgcatgggcaaaaggagttcccgccgacggacgttttgcaagatgaggtcttctactctgcgctgctccggaacgctatggatgtggatgtgtcggttgggatcggcggggtcgtgcaggatgggaagtggaagaatagaccacacggtcccatcggtatttatcatggcagcgtgccgttcgacggtaataccggacaagttatcgtgacagtttctcgtcagggaaagactgtcgccgagatgcggggtgcatcgatctcggaatcgtgtccggatgatatccagaactggaatgcctgggttggcacgaaattcgccaataatacgatttcacgtccgccgccttcgccggctccgactgaggtttctgcggcttcggctcttctggcgctatggaggatcccgtttgcgattgtctttgtggccttggttgcgactatggtggctgcgacggcgacgcctgttcagcatgagaaattggctctgacgatcccgatttcggaaggttctccgtcggtatatagtgctggtgcgggcgatgacgatcctagaagtctatatagccatggcacgagctatggtttatatccaatcaacgggtatactcgcacaacgacaacgggtgctctaattacgccttttaccccaactggtgccacggctttcacatacagcacatcttggaatttgaactgatctgagaacagcagtggatctcaattatcactaatgatgttgaggaataatactggcgatctaagatacgactatatatcgaggttgaccgttaggtagttatttcttagggctttgaattgtcatcaaatctatgtaatctctcaacgaaagaggacagcaacgtggtgaataacttgactaatgaatatgacttctaatagggtacatgccaaatgatatcaaaacaaaataggaaataaaagtacattgatcatctatgcttggaatgtaagcccttccccccaatccatagcatctagactgatgttcgcatctatcaataactcgatatagttaacctcaagtgctgtcaccttggacacagcatgtatcagacacccaagaaaagaaagtcgaagacaacagaagcaaaagaggagggactcccgaaacctgaaattgaaacccatatatactagacaaaagaaaagtcaagagaagtagacacaagaaagtaaacgaggagataagggaatagccaatgcaaacaatgcccggagaaaaatgctgcaaggagtcaaagaccgataaaaagaaaatggaaagaaagataggccacgaccatggccatggccatagaacgccctttatggcaataaaggcgcatccacgatcctcaggagcttaagcctcgccttaaccgccgcccagcccgtcttaagtcgattctcaacacgacgatcccccctcaaccgcatccaaataagcagcatgcccagcatggcaatatcaaacaagatctgccgcacagcaacccaaatcatccacttcacccacgctaacagaccagatcgacggcgatgcgcaatagaccgagcttccatctgctcgcgcacagccgcaatctccgctgtcattttcgtcaaggcctgctcgacacggcggcgccagcgactgtctttcgaagctggctctgaatgggaatgtcgactatgcgggagaccgttcccactgctgtctatactaataccagaggcaggattgcgacgatgtttgggacggtgatgtgaagagacgtcggtatgtgtatgtgtgtcggtgttggagtgggagctagcatggtccgggtcatcgtgatcgtggtcgtcttgatctcgttcttcgtataagctatcacgggcttcctcaaactcctcctcatcctcatcctcgtcctcattatgcggactcccatccttatggttctcatcagaccccctccgccgccgataatactcctcctcctccggctggctcataggactgagaacccgtaaccgcgagtcccgatctcgtcgactggtatcatcccgtcgatcaggacgatcatagtcctcctccgccattcgacccgcgatactcccatacgcactgcgcgataacggcgggacgccgactgtattcaccggactagaagtcgacgacgacgaggtgttgaacttaatctggtcccaaacgaattcgagctcggcgactagctcgcgtgcttcgggtgtttgggatgcatattggtgcatggtgtggatcagcgtcgagatgtacctgcgtttggcttcggtgcgcgatatgtcgcgctgcgcataccatgcatccctagacaagacaagaacattgtcagtgtgtgtggtgtcggattgtagagcgaaaagcgatgtttcatagacccgagcaagatccacaataatcaaaagctttctttttccccgcgcttcgggacataccatttctcgcactccgcgtgcacctccggcgtgttcccaatcggacgatccattactccctccacgtccccctctgatgcagtattagctcctccggtttcctcgttgttgttccaggtgtaatgccggacactcacccatactctgcttatacaagccatatagtgccaaccgctcggcagcgggaggtcgcgcggtgccggtccggggaatcctcttaacggtattgagggcatgaacaaagactcgatctgtgatgagcgggtgtcagtggaaatccggatgcatgacgcagggcgcaatctgcacaacacgcacctacagagtccgacatgacgcgataagcggtccggtttgccctgtcttcatgggagcggggttgggcatcggcttgcgcgggtcctcatggggagcgtagaagactgtaaataggaatttggtgatacagcgaggttttttggttcttcaagagagatgctggaagggggtgtgtttggtgaagagggattgtgtccgatcggagattcccgaggttccctggtttgactgtgattttccccggaatgtggtcttcgtttcttccccggattgaaaaagattcactccaatcaaaatgtggaaagaaactcccaggagatgatctggagatggcgtgtgttggaccgcggctctcggcgatcattaggcacttgtgattgtcgccgaaatcgcattcgacattctacgataattgcacttttataagttgaattgtttctttgttcttatttcttaatcgtgtatagtaacaataaaatacaaatgaagaccctttactcgctcggtaacttcttcatcgtctgcaacggtttctccgcatccactggcgtacccgtcatcaactcggtggcggcgcgcgcctcgtcaccgctaatcggaggtccagtaaagtgcttgcgcgcataggcaaagtaccagatgacactaatagcaccgaatccagcgaaaacagcactggcataattcatagactccggggtaacaggcaaggtaacgggcatgcagaagagagcgacagccagcacgatccacgcaatggtaacgcagttgatggcgaatccaaagcgaccgagagagaacgaggaattcttcacgtcttggcggcctcgaatcaaagagatcaaaatcgggagaccgtacgaggtcgacagacagatagtagccacaccggtgaaggagttgaacgcagccgtggaaccaaaatagatcagtcctagcaatccatccacgacggccgatagcacgatagcccacacaggcacatccagcttggtgttcacctgccgccagagcgtgaagcccggaatggcgccgtcgcgagcgaacgcatacgtgcagcgactggcagctgtgagagacccgatgccggcgaacatcatgatccccagaatcaggaagagtaagccgaagccaccgcctgcagagccggtcactgtcttgaagagcaggccgatcggctggccgctggcgacctcgcgcagcatctgcacgttgggcatcacgaacagaatcgggatcaagtagaacaggccggtgatgccagcagccaccacggatagcacgattgccttgggcacctcgcggtgtgggttctgcacctcttcgcacatggcagcgaccattccgtagccggtcagggtgtatgccgcctgcagcaaacccacgaagaaagcccatccagcgggccagccgctcgtagaggagtcgtagtgagcgaagacgaagtcagcgtctctgcggttgtcggccattgtcaaaagcgtgacaaggataatgatgacactggctgcggtccagaagatgcagaccttgttgatgagatcgagataacgcgagaaaaagatgttgactagggcgcagacgagcatgactgcccagaacatcaatacggtctgccacgcattggcaacgaaggactcattgaagatggagatggcgctgaggatcaattggccgccggagaagatgatactcagtgtgacggtccaattgcccacgagggttagccagccgtcgatgaaggacatcaatggggcccagcgacgcgttgagagcatcgcgctccagtagtacacgcctcctgctgttgggtaaacggcgcagatctcagcgagagaggcggcgatggcgattgagatcagggagacgaagacccaaccccagagtatggtgacggatagaccgtcggagagggtgatgtagagggtcgtgctcagtccgaagggagctgccatgatggcaaaggataagccgaggatgctcagcatgctcaggtttcgaggcaattcactcttgtagcccatacgggccaatgcctcgtcggcggaggcatcgacagaagaacttcgcatgatgaatgtgttgggagaatgagcattccagtaagcaaggttgtcagttgatattatacctaaaacgagattaagaaagcgccccgcatagaaaacatggcgcggtccgagaccgcgtaacaaggttttagagatgaggcgaaaaaaaagatatctcgaacgaatgacagggattttttaggcttatctcgttgtatctttgtcctgggctgctaagaaaaggttgtatgacctaatggtcctacgataagagacggcatcatgatccacttggattcccctattttattcagacgcattcatcacgatatcacgatatcagatagcacatatatcacgtgagaatgcccctggatatacctcgcatcttaatcccatccatctcaaccctagacctggcacgcaagaaggcagagatgtggaacacgttggacaccataagaagatctacagcggggttccgtgccaagcatattctagcaccatgagtgcaagatcaagaacctgaatgggaggagaacacatctacagatcgtattgcctatgcacacggctcactaaggcactgactactttatacaacccaccaacgtaccaagaaggcattctaatgcgggggctgggatgaggacactggtggtgtggggaaggttgggtttcaaaggggacacttgcgattgacagattcggccggaagaggaaagtggtaccgaactagtccgtaaggagaagagaaatgcgagaatcctactcagctacggagaactcctactcaatacagtctacactggaaatggaatatttgaatgattcattgcacatacatcaaggtcacgcgaggtgacggctgccacatcaggaacatgctgcgaagactccatgcaagaaagagactgagcaatcgatgagcgccaggatggatatatcaacacaaaggaaggggggaagtagttcaaaaggtgaagtccggatccacacccttccttcggaatttggagggcagggtaaagggggtatcaaagtgggtaaagcacaaatgtcatccagtgatctcgctgggcagaagaaaaggaatttttttcttgtttgatgagatatctaatagaacaaacagggagatcagtaggggagggaaaggagtaagggcggaagtaggccctggatggtaaggccctgagtgttgaaaagggcgagagaaagatcgagatgggaaaaggctgtcgggatttttcggccgcaaaagaaccgtgcaagttgaactccgtctatgtgaccactctagtagtcaagtaggtcagtcggaccgccttttccgacatgtcacgttgaaagaagggaaataatgatcgaaagaaacgaaatgcgctgagtcgtgaccagccagctagtgccaactccaaatcgtaaaaaaaaaatgaccgtggtaacggaacgatcgtcagtcgaggtcggatgaaataacaagaaaacgcccattcatgcagtgtcgtcagtccggtgaagtcgttacatgagatgcaaatacagtcgcagaggtaaacagaggcaaacgcgagtttaaaagggtcagaaaggtgacgaggccggtgacgaggccaacatctatggactcagtccgaggtcatcattcaagtcagggccaaagccggccatatcgacagagtgcaaggatccaggtcccttgcccagggagatgtcggaggatgcatagtcatgtttgagtcgttcgtgtggtccgaagatatgcggtccgaagaacggtcggttctcgtcatttggagtgttgccatccccgccgacccacggcccgttctgccagaagcgggtattcgcttgctgatctccgaacagatcgtggtggtccgggtgaggatctgggccatggatggggaactcgtttggcgactgaaatcgtagatgcgaccgaccgaaactggagcatggagaatcggcgtggagcggcatgtcgagacccgagagaagggggggatcctccaccggggtgatgtcaatcgtcggattttctgtttgctgtgccagagccgccgacaaccggagattggaggatgaactttgccggctgtgagtagtcgatcgctcaattgcacgctgcacgaagctaccacaggccttcaagaccttttcttgatgctccggtgacagattgttgaagaaatcgttcgacagggatggcttgggcgggtcgtctgctgcaggaactaatccgtaggtagcctttgcgtattcggagagacccgacggcatattatagggagactggtaaacattgggtgctagcgaccgttgctgatccaggtaggcatattttccaggcatcttagcagcagccacgctaccccgatcaacggtctcctgcttgataccctccgactctttcctctgaataacatcgagtcgctcgcggtggctgactagcgaaaagcggagcatctgaaggagtcgagtgacctcctccgaccgcatgttcagagtctgaggcggcaacagagtgccatccgccgcccggggctgaacccgttgctgagccatggccagttccagcttctcgaggccattggcgggtggtattgagcccatcggacccaacagcgtctccaccaccaattcggggctgacgatagtgtatccggcaaagacattagcgtggtcggtaatttgggctaaccggcggcgagcaataagttctcggacattggcaaaggtattggtgggtgggaggtgatgctgctgctgagcgtgcgacttggcgaccgaaggatagggggcatgacgggcagactgattgggcagagttcgaaaggccgacggcatcgcaggagcaccagcagcagcaccggtaacagggataaaaggagggggaggggcgaggtgctgcaaggcagaagagggcggtcgggattgtaggtgaggggcgttgacattcgaagagtaaatattttgcttctgatgctggttttgctggtttggctgattcaggtttcggtagggaggggcaggggcggtggcagcataatgaaagtggtggggtgagatcttcgatgcacgagcgctgacacccatgccaagcgacttgacgctgtccaggaaattggcccgaggattgtggatggacacgctagggttgtgtgtatactgtgccctactttcggtggactgcatgcccaaataataccacatctgctctccctggaggttgaccgtcctgagtggggcgaattgattcctagtcgcatccactgtctcaaattcagcccactgatagggagatcgtgaatcgccgaatgcactgcctgccgccggtaccgctgattctaactcctttcgctgttcgggttttcgcgctaggtgggctgggaggggttggattcctagtgcgagaggcgtgaaattgctcttgcgaacaacaagcatccagcgatagggcatttcaatcacatctctgtagatttattagtgtgagcagaacgtcagataggggccggaaaaaaaaaaaaaaacttaccctctgggtagcaccttgagcaaaagacttcgctccgaaggacgattttcaagaacaatggcgccattaatctccttgtcggcttgaaattggatcaaatttccttgcaccagacgacgagccgattcgattacccgacgatccacatcggacgattcacccaggactccattaggccgcttctggcgatggaacttgcatttcaaatccacacttggaatggagtactgcgtgccatcatcggcaatgacagcaatcgcaccgtgctcaacctgaacacccgccaaaagagcacaggttgcatgataagcgcgcgtgcattttccaaagttacactggaagcaggccccgcggacttcgcggcaaaagagacatttaagacccaggcgagccttggggattttgtcaatgtcacacacaacttccgtaccagatgcgtcacggagaattgtggtctcttctatgaacgccgcacaccgtctatgcgcatgccctttgccatcttcggtcggcagaagatcctcatagtccagattgttagggcatagcaagcacgggagcttccgtggtccttctgggtggagtttgggtcgtttggtattcggcccgtcgcccggattcttccgttttcggccacgagtggatgtcttcccaggcacactacgtggcggtgtaagaagatcagaagcgccttcaaagccatcgaattcgctctcaaattcaccatagtactcaggtgtgctctcgccgcgcagcttgcgctcgatctcgtccacatcgatccagacactgtctgcttcgcagttgcacttcttcgcgatgcgagcatagtctaaccattgctcggtcgcgaagttgaccgactcggcgcaattgtatccgacgttatacccagagtggtacccgtaaggaaatgtaatcacaaattctccttcgtaatgaaccaaccgattgacggtgatcccatactgcgatttgagaaggctaggcgagacgaggtaggttttgtgacgaaggaattgatcgcagttcttcgcatcactggaccagatactgcgcatgacctgttcgaagcgaggtgcatcttcttgggagatgctgtaccactgcttgggggcaccgaagtggatgtagttaatgctgtacagatctacatcctcaagatgccaagcaaaggtagccttccacatgcccatgtagagataagcagtgttgactccaggtaccttctgcccgaggacgtcaagcagattcggcaacttggcgacattccagatttctgtagaatcctcgaagagcgaaccgggcatgtcagctccgtacatcggattgttatacatgagtgacttccagtaattagtctcaagctcctcgcatctttccgcggtgtattcttcatggtcatggatccggtaatcaaatcctgtgtacgcctcctcatcggcttgatcaatggcatcgcctcggttgttctttcggcgtgcggtcacggacttgggttgtcgtccctttggttttatggtaggtagagattcgccttcacttaaatcctcggtcttcggctgcacggggttggtctcgggtgatacaggcgttgggggaccctctaatctggtcttctcgacgtcatctgcaggaggctcctctttgactttggcctgatttgaccgtttaggggggcggccaggccggcgcttctgaccctcggggcggatagacggggcccgtggtgtcggggccgcacggttcacgcgttcttggtttcggcgtctctctcctcggcgagccgggggttggtggctgctttcttcacatagacccttccactgaggaaggttgtacgagcgttggcgttcgatgttggcttgggtgtatgtaccgtgggatccgtggaactcttgcatgatgggattcttcactcggattttcttgactgcctcatccagcggtggaagagagtcggaccttgaaaagtacaaagtcatgagcacagccatccacattggtcttcatttgatcgactcaccattctttcggaggaatgactttcacgatgcctgcctgcattccatatttattgattttgttgatgaagccctggaagtctcggaattggtccatcgtctaaaacaataccacagtcagcctggctctggaggtataggcgttactgcccagtctcacacaactgggagatctccaacccttggtcatcgagcaggagggcagtggcgtggaactcaccggcttgaaaacagggaccttgccgtcgccatagtaatgatcaggctcaatttcttcaatttcctcaaccttctcctccacttcttcctgcttgatcttagatgtatcgggtgccggggcagattggtggtcaagctcgagatccgataactcggagggcactccttcaggcgcttcctttttgccgttggcactctgcggcggagtgatggagatttcgacgacaggttcgcctccgagcgagtcgcgctgcgactgatcgagtactgtcgccatcatcgagggcgatagaggaatgtttgggaaacggtacagcgtatgagttgccgtcgtcggatagtgcgaccgctgatcgacggcgtgaagggagtatttcccagcggtcggggaaatgggaacaagcgctgcgaccgagcgaaaggaagcgcgaaattgttggggtcaagggcaccagtattggtgtgttgagggtggtcgacacactccttgagtgtacagagtacaacggaggtaggtagttgaaacgattgcgataagctagctcttcgcgggtggttgtttttgcctaaactgaacagaaaggcgaactgttttagtcaggtcaccagtgaaagactgaaatttgtgagacaggaagttgtagtgtaggcagaggaaacccttgtacggagtagcaaaggcagcgctaggttctccatgaaaaaggtagagaagtgcagcaataccagaaatagaccaatcatgcaggtgccggcgacgcttgaaggtggagtgcacgatgggctgatactggaaggaggcaggggcaggtgggcacagggtgaggaatgatgggcttgaaattggacaaatcagagcgctaatatgggaagggtgggaatcgtccgatcagagagcaaagtggacttcggggcgactttggcctgggcgcctaggagccgcgaaatgattcgtaccgtatccggtctcggacgggtaaaaggattgccaggtctcaggggagtacaagttgatcgcaaacaaattcaaactcactaaatcactggaacggcagttaacgcctgcgaatccaaagaaatgcaaagaagcgcagaagcaaaggtggtatcacgatggtcaaaatagagcttggtcatagcaccttgaagctttcagtgatgggtcacgtgacaaggatgtaatttaagattatgtgatctccatgttctggatctgttattttaccgttatttactcaatttcgtactgtccaacaagtttggtattgtcacggatcatacaatgttcagccaatctcggataccatcggagccgagcgtttcctcccttgatgagatcagtgatcaacatcaagattaactgcatgtatacagtccaggacttatatcctagaacatatgggcagtataagttctagttattcttgcatcctctatttcttctatgttataagtgctgaattgtcttataacttggcgattttttctccgtatacggacggagtacatccatccatacttaggctagaactctctatattaatcaagcgagacctccgaggctggtatacaatctacactctctccgtaatatcttctagcattatcattacagggtaatctcatcttcttctcgccatgatcatatactaatccgggaaaataaaggtccggtcggatgaggctctagtggctagccagttcgttcactttatgtacctacatcatgcggtagataactatatgtgtctaccggggaaatatgacgtatattcagaagtgtacagcatacaatgtacaactcagacatgtactccgtacatcactttgtattatccatgtaaacaaaaatacataagagtggaccgtgttggtccttctttggaaattgaattgtagatctgtggatgcatgaacggtccgttgtcaggatctccaaaatctaatattagttagagcattgaggtcatcgaggcgcttggatcactctctgcatgatcacatccatgctgtatctatttgaaactattgcacccattcatcgaaaagctgggtatccaaattaatatatccatcgacaaccttcaatccccgcaggcgttcctgttcaatccgctcccaggtccactctgcgacatcccacgagtcagtattctccttctgctgcttatccagtgtctcctggctcggaatctgctcatcgtttatcttcaatacctcccgagccaacgatccatccacgcctcccatggccgtgataccttcaccactagcaggggtgccaacgtcggaagcttcggctgaggaattgacgtcggctagcgcggtcttgtcttcactcccggaggacggcgcgggaaggaatccgctagcgcgtagaagccgctccgggggaacagtcagccggcccttcttgaccacgtacttgctaagacccacagcaaggaccaccttttcgccgccactgtggcttgcaggtcgcatgaagcaggtcaagatgtacatccacttcgcatcccaagagatcaccttagagtgcatctcatatagttcgtatggcttgatctcgcgcttgaatgtgcagtaaacagatccgagtacaatcgacatcggcttgcgccttggcgctggctttccctctttcttgcttgcggctaggaactcctggtcgagctccttgctcacattgccgactccaggactgtaaagtcgggtcaccagcgttgtacgcgaaatgtccagatccgtgaagtaggtgctgttggatttgtgcaggttgtaatcggtctctagcaacggcgtgcgagatgtgaccatgcatggtacgaagatgggatgtgttggtttgcctcgggagtccacaatgagtctccccttggggaaaagtggcgcactgggtttcaaacgtaggttgcttacgaagtgatacagcaaacggaactgttgactcggtcagtagtgcaacataccatggggggaggtcaattccagaaagtcaaatttgacagtcgaacaagggcaaggaacacttacgtgccaagataatgggagacttttcaagttagtcactgcaagaagcaaggccaggtttctccatgaggcgagcgccaatacgcctgctagtatctcgcgtgtatactccatgatgaccccgggaaatttcaaccaacacagaagagaacgtctgatagcttcatacaggtacactagacaaggcttgactaggatatactccggttcatagatgtctcgggagatgagagactttggatcaggcagacttcaccaaacgcaattaaagagagacagaataatgtataaaaaggaatgaaatggtggacccaagttcacctgaattgatgagtccgaaagccgagcctgccgatatcgtgaattccccttcggaagccgaggccgaaacttgtgcacgtgatatcgtgattactcattctctcagtgcgcacgctctttcccagacaacccaggtgcccagaatctgccaaatgtcaataggttttcgaagccgtttatgggtgaaaacggcaggaacaagccaattaccctccaccgacaatagtcccgcagaaggagctcaccatgcaagcatcgggggaaatagtcaaagcttacaagcattggatccgagaattatgctaacaccatgacttgaccagacgttccctaccattccatcctcgcacagttctttacgaaccgaaagtcccatcccgtcgtttactctacgacgttgtcctgccgcgtcgccgcacgcgaagcctagctgcgagagcttcatggccggggtttgggttcgtcaggaatcgtgctaggatgaaacaatgttagacaacgtttggtcgagtcatagtattagcataactctcagatcctggttgcatggtgggctgatctatggattccaataatgctacccaggacctggtttggcctaggaatagttattgttgataagaagtagttgatgtttgaataattgtatagttctaatgcacagaatagggcctgaacgtatcgcagctgctcattggtcgaacaatcatgcattcatcaaataatatcaaggcgttcaccacactacattcaaagatctatgattcgaccttttgaagtttgttgaatttatactttcccgcttggaataagcttcattaagggaaacactcggacttgaaaaagaagggaagatactgatatgttacagcactatctgtatgatttgggtcgaatgttgttccaactatgggacaaggttatgccattttcacgcatagtaaatcaacacacaaaggaccagcgaccacataagaaggaccggtacctgaccataagccgtggaaggttgatttataggcacccttgacaatagaaatagcactcgagcatcgaatagtactctggctcattgtgatcccatactaacaatggggagggagtagcgaaaaggcaatatgttgctacactcaactttgttttgactggtttgcgctcaagttgagatacaacgcatgttttcaagtcacaacattggtctttataccttttcattaactcttctcaaatttctccattgccttccaggtaaccttaacctcaacctcaacctttctgttattgatcgttagcaaatctgaccaacacctcgtgtgtaggcacttttaatttcaaacttccttcctaggtccaaaataacataaactcttcgtttcctcctttctcctgctcgtctctggcaacgcctgtcaacaccaaaaagccttgagactgttcatcatgtcggacgatatcaccctcgcaggttatcttttcgaacgccttcatcaagttggcctacacgccgtgcatggcgtccccggaaaccataatatcggaatactgagagaagccactgatgcggcgcttggatgtgtcacacaccgtagcgatcttagtgtcggacttgtcgcagatggatatgcacgggtcaagggtatcgccgctgtgatatcttcattcgagaatatgtcaccgtcggtcccgacggcaatcgctgcctcgtaccgggatagaattccagttgtgcttgtgattggtacacccgaacgaaaggtgcaagcgcaggcttccaaattccaccattcattcttcgacgcgcagcctaatgttcctcgtcagcctgatgtctttcaaacactcgctgactgcttcgacaaaattaccattacccaggagtttcttgttcaccctagcgaggcgactgctcagattgatactgccattcgaggatgtatcatgcagtctctgcctgtttatatcgaactgccggaagatttggtcggcagtatggtaccggtgaagggactcgttcagcgcctggacttcaacgctccgccccacgatgctgagatcgaacaaacggtagtggccagtatcatgaacaagattaggcacgcacaacgaccggtgattctcgtggatgcgggtgttccatcttgtggtcttaccaaggaagcaagccagctggcgaaaaagactaggtttccaactgctgcgacccagttcagcagaggtgttgtagatgaaacactcaaaaacttccatggggatatctcggatttcgacatgtacggttcatacttcagatcgtctgacctgattctccttattggacctctgaataccactaagtgggctgctcccgccgtgttcgaggcgaagacagcagaaaccgtcacattcaatagaaattccgttgtcattggggaccaaagttatgagctcttctctagacctgtgcttcagcggattctagactgcctgactgagaggaaactgcgtgatcttgcgccctaccccaatttacccaatgtccgcgacagcattgaaatgctcccaagtcagagaaatactgcattacttcagcatgacatttattccaccttttggcgacggatgtctctttttttccgtccgggtgatattatcttgactgaaacccaaacagctcaggatggagcacgctcatttgttttgccgcgtgatacaaccataatcaatcctggtatcaggaagttcgccggacacatgcttgctaccaccttgggtgtcgcttcggcaaaacaaggccttgccaaagcaacctgccggctttcgcacggacgaacagttctctttgaaggagccaagggtttccaagagggccgaaatgacctcagagccatcatcgataacaagctcaatgccatcatattcgtgatcaacgaaggagaacccatcgttgaaaggctaatgcacgcaatggagtaccgccagcaggattctggtcactggagatacgcagaatccgtttctttctttggagccccaaatgtgacatcttacccggtctcttccaccatagccagaacatggggcgacattgacatcattttccatgatgagatggttcaatccgggacagggctgcacgttgtggatgtcatggtcagacccggagatccaaatcaaagcccgtgtattctcacggagatatatggcccacccccgagcccgtttaccttgaagaagcatcacatcaagcaagattgatcgccgcgaagtgagattggaaagacatttgggctctgaaacatgcaagattagacaagtcacaagatactttacaatatgatgttcatttatcataattgcgcccgcaaaacatagagaatgttaaaacaaaatagacagacacgtacgtatacagaaataggtgatatcatcctgaatccgctctatatgataaaatccaaccaccatctagttatgctgacaactctcgcaccatagcccatatagtaaactcctccaacgaatcccagaaccccttaggacgcctttggctaccaacaacagtgaacccctgttttagccagtagccaccagtgtcctctttattaacccgagtcataattcgtagcggagacgacacatcctttccattgacccgatgccgacgcaagatctcttcttcacacgccctcacaagatgaccagcaatacccctgccgcggtattgtggacctggggggagagcaacaacagcaagctcatagtcgccgggacaagcctgtcggtgcaacatttgatcgacacatcgagtattggcagcgtcttcatgcccgtttttagttgtaggcatccaaaggccgtcgtctttccatttctttatacttgcggtcccgaccaatttgggtgtttgatcttcggcatcttcaataaatgccaccgcggtgaatccgtctgcaccaagctcttcggacagtgcggagtcggtatgaagtctggtcttatttgtggaaaactttattttggcagtgtggctgacacggtagctggcgttcaccatggacgtaaaatctgagatccagggttgattgggaagagctgatgatgcatagaccttgatgtggaagtccattttgggatccatgtttggacctggaaagtttggtgagatccaggatgaactaaatataagaagatatcttgtttatcccaggaaatttctacaatttccaatgtggggttgaacaccgacacggagctaataatgagtcacagaaacctacctcgggaggttatctaaattctagccgacatgataacaaatgtctttgaaatgcaagtcccgaaaataaagatgatttcttaagctgtttggtctgtagatacggactagtgctattgaattcgctgttgtggaagtagacaaggggcatcggtgggataggaatggcccaaccacaatcatgggggcccgcaagtcagagaaacttagagcacatactgttgagagtgagtatatagtttcaaaatgaaagttgtagtaagagctcaccggaatgaagaggcttggaacctgcctctcatactcatcccatgtcttcccatacttgtttttacatttggtgatatccctcatggctcggtggccgatcatgaccgcgaagaagacagggtagaaccagggaagggggctgtcgaacccggtgattagggcccacgacaaagcgaaaaacatatcgcaactgtaatggatcttgcgagccaatcggtaccacccatcaacgaaaatggtatcgccgtcgtctgtcacaagtgtctttggattgttaacgtggcgccaaggaagctgggggaaggtattgcgcgtaaccattttgcctcgctccatcatgcggaaggcgttcttctggctgtttgcagtgtcccagacccagtagacgcaaagatatgacacaaacaataccgccaatgcatttttgttccatgcatatgttgacgggtgacgattagccaggtacagaacgcagtggcaatatgacatagggacgccagccatgttccagaagatcaacaagaatcccagtttctcctggtacatgtcccatgttgtggtgatgaggtgctctgccttggcgcaggcattggcgtaaaggaagtgtgccatgacaaggaacataacttcaccggagacatagccgtagagttcatattggcgagtggcagctgcgcagctcagacccaagagcatgaaccatgggatacggacttcgtagaacatcttaaagtccaggatcccgaacatgcgtgggttgagttctgctcccatgaaaaaatcatagattgggtaaccagtgatgcggtgctgggtacctcgagcaaatgcagagaaataagcgaaaaagctggcgagaaacccggacaaaatcgccacggacatcagaggaccgaaatcatctaggatagtgtagattgggaacattccagtgtagtgcagagcagccatgacaaccattgtgaagtacaagctactgtaagcggagcaataatactccagctgcttgcctttcaaatggcgaagaggcttcccataacacgtgaacccaggcatgaagatgtagcatgctgcctcgaagatgtagaatgtccagtagatgcgccacgccctaaagtgcggaaacgcaccgatgtaaacaaggtgacacagatgctttccgaagtccgcccaggactgtccgttttgcggcagaggtagtttcccgtcatagtaggtagcaccgatccacatgtaccacatcagcaatgggaagccaatcataagtgccaagttaccgagtgagccaccgaattcgaattcatctgagtagtccactttggtgtccatgccgggtatccatccaccagcgagttgcgcttgcttgaagtcagcgcgcgaatttggcttgtcaacaacccgagggttgccatcctttgaagacttgacttggtcatccatcttgagaacttgagactattgtattaattgaattgatggaaaccaaggaattgacgccaacaaagtacactcacagtcaaaaaatggtccgcgctgatacaggagaaaggagaaggagaaaggggaggaggaaaaagaaaggaaagggacgagaaaggatgaaagaaacaggaaggaccaaagggaccgagtattgttagttaaccttgggaacctcgaacctgagaagtcaggccaacgcaatgatacagttcccgtttgggtttagaccccgccgtctttatcccaattaggattagaccccgctactagcgttacttggaaatagtgctttggttgtattattgcatttccaaggctcctacttgtttcatagctcagataattgggcagtacgaaacactctacacttgacctggggatacataatagcgccatcactagcgcttgataatttctagcttggttgtcatgagagctgctcgctagctttttttttgattagcctcaatactgatagagtaaacctcctaagcctccgacaacctgttcgttctcgatgctgttagactttttccgtatatctattagttcaatagaatgcaatggcaatgacggatacctagccaatacatacatgtaggtatgatgtgacgtcaggtgatcttatcgcggattcgcattaatcagcgactcttatcaacccgccagtcccccgagattggacttctctccgaagattcacctcgctatgactgatcggtcggtcccatgaattatcagaccatcagtatggacggcaatgtccccgaacagcgtcagcgcactgtgggagggccgtccctggatcagccgcccacagatcctatcgctgatcccgcgcaagctcgcgccacatcccctcagagcttcactccacgctcacttctcgtcggtcttattattggtgctctcatcacattctcgaatacctatttcggcttgcagacaggatggatcagcacaatggcaatgccctcggccttgattggcttttcggtcttcaaggttctatccaagcacctgtctttccccttcacaccggttgagaatgtcttgatacaaacggttgccggtgcagtgggaactatgccccttggatgcggatttgttggcgttatccctgccctggagtttctgttgaagcctggcgaagatggacccgaaggcgatggcggagaaggcgaaggaggtcctttgaaactcggtttctggaagttggttatctggagtctgggagtctgtctcttcggggtggtgtttgcggtcccactacgaaaagcggtcatcgtccgagagaagctgcgatttccgagtggtactgcctcggcgttgatgctcaaggtcttgcatagttctggtagcgaggaaaaggttatagcaccagaaagttcccgtgcgggtatttttaacacggaggccgaaacagctggtccatcccaagaagacacaggcctcttgaaggatggcgatgctgaagaccaagcttccaaggagcaaaattggcgctcgaagatgcgcatcttacttggatcgtttacagtatcgggtgcatatgtgaatatctccaactggactctgcaaagttcatgctaactcaattagactcttttctcctacttcgtccctctagtccgtgccatccctctgtttggcgtgggcatggcggataactggctgtggaccctcaacccgtcgccagcatatatcggccagggcatcattatgggtccatcaacgtgcatgcacatgcttttcggggcagtcttggggtggggcgttctatcaccgttggctaagagccgcggctgggctcccggcccggttaataactgggaagatggcagcaaagcatggattgtctggatatcgctagccattatgcttgccgattcacttgttagtcttgggtggctggtgctcaggcccatcctgaagtactctccaagatggatagcctattttcgatccactcgtgctggtcagtggattgcactccgactacattcttctcagcactcatatatcaactactccgctttggagccagagcctcatcttttggctcatgaagatgtcgcccaacatacactagtaactgcaaacgaagaggataaggatgatgcaccgccatctgaactcatctcaactcgaacagtagtgattctccttcctttgactctcctcttgaatgtcgcatgcatgcactttgtctttggggacatcatttccccctttctgtcgacattggcaactctgctggcagtactactgtctattatgggtgtccgggctctcggcgagaccgacctcaacccagtttcgggtatcagcaagctgacacaacttctcttttcactcgccacgccagcatcccatttctccagacgcaccgcattagtgacgaacctgcttgcgggtgcagtctccgagtcaggagctctgcaagccggtgatatgatgcaagatttaaagaccggtcatctactcggcgcaagccccaaggcccagttctatggccagataatcggcagtcttgtgggtgcagttctatcaactgccgtatacaaattatacgtgaacgtatatgagatcccgggcgaaatgttccagacacctaccgcgtatgtctggatcttcactgctcgccttgtgaccggtcaagggctgcccaaaatggctggacaagtctctgtcattgctggtatcgtgtgggcattccttaccgccttgaggatcgtagctgcgtcccctgcctttgcacgcaacgggaaaccccctccttggagatgttggatccccggcggtatcgctgttgccgttggtatctttaacgagccttcctttaccctggcgagagccatcggtggtatcattgcatggtggtggtcgcggaggcactctgaatcgctcaaccaacaagtggacagcggaaacgccactactatgggatcgtctctggagactgaattacaggatgcgcagcgatcatcaatatcagccgaacaggcatctgaaaaagcagatgccgcctcctcgactgtcgtcgttcttgcctccggcctcattttgggtgaaggtatcatgagcattgtgaatcttcttcttgcaagtgggcgcgttccacatctctgatcaggagagatacgagaaaatgctcccatcggcatgattttttattatcaaaagcacgtattgtatttagagattatgttttgaacgatattagatgaatgtcaggtcatttttcgcggcctttaatgatttccaatctactgccacttcctggaatcgcctgtctcatattgttgctgacttcaaattggtcccgactacacgtgcagtaaaaatataggaaaggcatgtgctaacaagccatgtcaagaaaacagcaatcttggtctcagggtcttaatacccttttagttgatcgtatcccaatttaataacaagatctctaccaagtcccccagccccagccccagccccagccccccgcaccccggggaaaagcttgatgcttcactttcccctgcaccaattcggattaccaagcagaatccactccatggacctaactagttatctccgagacgtgaggacactaaattttcaaatggcgctctccgcaatcctgtcctggagggatcggcctgctccgacatcggcttcggcatcaatatcgatttgccgaagcaacatctacctagcacggagtactccgtactagagatggatttttctccatgagactagcaaacatcactctacggtattgatcccaatcatgccacgcatatggtcgaagggcagttttgtaatacaagtcgagcccgagaaggatcctgcatctcttgatccagcatacctcgtcaagtgggatcaggacgatgtattgaatcctcaaaattggactccccggtacaaatggtgggtgacatttcaactgggcatgcttgctttggcgggtagtctagggtcaagcatcaccacgccggccgatgacaccatcgcgaggtatactggcgtgagcagcgaggctgccgtgttggatgtgtcgctgtatctgtgagtgggattgcaaaaaaacaccaaatacaatgctaatagtaatgccagccttggcttcgtcttcggacctatcatctgggcccccctttcagaaatctggggccgaagagtcagcatactccccgccgtcttttgtctagcactattctccatcggcactggcgtaagcagagatgcagcctcggtgttcgtcacgcgctttttcgcaggcttcttcggctctgccccgattagcaacgtcaccgctgcactaggtgatatatggagtaaagagacgcgcgggaccgcagtcagcctctatgcagtggccgtgaatggcggcccggcattaggtccagtgatcggtgcagccatactgttgaatccgaatatgggctggcgctggaccgcgtacatccacgcaatctgggtctttgtcattttcaccttgaccttcttctgtctgccagaggtatacccgctagtgctactcaagcgcaaagcacaacagcttcggaaggacaccaatgactcgaggtactatcatccccatgagcatttgaaactcgatgtcaaatccgttgtcacgaagcagctcgctcgcccattgagaatgctggtcactgagccgattgtcacctgcattgccttctatgcttccttcgtctacggcgtcatgtacctaacccttgaggtatttccaatcgcgttccagcaatctcgaggttggaaccgcgttgttggctctttgccgttcctgggattgttgattggcgtcatatcatcggtaggtctcaatatctggaaccaataccgctataaccagatatccaaggaggcgaatgggaaagcagtacctgaagcacgacttccgcctatggcattcggggcggtattctttgtcgtcggactcttctggtttgcttggaccgctgaacctcctcaccactggatcctgccatgtctggcagccgtatttattggcattggattcaactgcattttccaacagtgtttgaattttttgattgatgtgtataagctctacgctgctagctcaacggcagctgtcacttttctgagaagcttgctggctgccgggcttcccttggcggctaaaccgatgatcagggctttggggattggtcctgctgtttctattatcggagctgtggctgcggctctattgccagtaccctttttgtttatgaagtatggcccaaagctgcgagggttatcaaagcttgcgcctgaggattcttaggattgttgataattatagaatagatggctagatggtattccacttttatcccttttctaatactggtaatagctagtcacaccggtcaaatcgcatatagtctcgtggttattgactgcaaatttatatattcctttgtcttcaaggtcatgtccaaaaaccccaaaacacccttaaacatgatgcaaatccccaaacaatacttacaagcaattcaatcatcgccggcagtttctggttgatcatctgagttagcaataatgggttcgatctcgaatcttatctgaactctatagacccaattccaaatgactactcgggcgatacgtctcgtacctctagggagagatgatataagaagtatggcagctgcttttcctaatttcgtgccgagaagttcctcatactcagcagtgccacgttcgaccttcatgcacgactcgtgcatcgcagcttcgaaatcgcgtccaagtctgggatagagtatccgcctgatatacggtccagtctcatcattgacgacgtgggtaaacataatatacctcaaagtggacatggggtggtcatactcataaacagccttggcgaattcattccactggatgttatcgtacctaaaaatggaatcagcaacaagcagccccgggccgactagatgtgtatagctattactcagacttgggaagttgaatctcgctagggtctctgggttcagaacattgttaaaaaacgctgtatgtcggtacctgtttccctcggtagggaggcccgtcgactcgggttcgcctccgtccataaggtcgcccagatctcggtgatagctttctccgagttcaaaaacgtctggcggcggggcgttcatcaagtcgtctagagttgctgttgccggggcaatattgcagtctggttcgttagggtcttctaaccaagcttgtagttgagctcctttttctcggtaccggttgattgtcgttgtagaaggcttttcatacatctcatcgtctgtgttgaagtcttcggaatcactggaggcggcaatatttggagaagtgggtggttctggaaacaatagttccggtccccaaaaccgtccttcagtcgaactctccccactggtgcgctgacgcttcgaggggggagaaccgtgagagctaggagctgggctccattcctgatttacatcctcaacctcttcgacgtgcccccgcttcctaccgctataggattgcatgctgtcgttggaggatctcaggctccatcgttcgattcggccagactggtgcgcggccctcaaggatatgggagcacggggacgcggagaaccgaagtacaaggcatcatcatcatcagatgaagactcactttcacctgcattggataaggtacgtctattctgtgacattcgggctagagggtaggtcaataattcgccgggatcggcatctggcatatcaatatcactgtcagatctggggggagagggattgtcacttattctaccatcactggcatcgttcatatcgatatcactcatgtcaggtgtaatttctgtgcgagaattgccatcattgtcggtggcggcttcctgaggtttagccttgttcttaggctcagctggcttagggtctttacctggctttggggctttggctgtcacatttttagggtaagtcattgtagaaggtgcattatgcccgcctctaggtgccgtttttggtaggggcagtgtttggccatcggaatccgagtcatcactgcagtcgcagcggcggccccagcatttgaggctgtggcagaaacgcttcattgttatggttgagttaagctatacgtcgaacaattggattgatagagaagttgaatttatatgatgttggatctgttgtattgtacttgctggacgatgctagaatggagagcaacagagagatacaggcgaagctatatacttttgccaacgtctctgtttttgctcaacatgggtctgcctgctaacccacgagcgttgaagcattactaaaataggttcacctcaaatagaaccgcttagaacaaaaggagtagcagttcaaacaatggagacaagtgcatagagaggagtttcaaccgccaagacaaagagactcgaacttaagttgacaataaggacgactaatttgggaaagccaaggatagaacaaggaacggacaaagaggagtcgaacaatgtaatgttcgtctaagaaataaagagcgagctactatctaccaaggccgtcaacaatgtaatctgctattctcgaatatccaagcgataaacatagtacattgttaaagacaagcaaagatcaatattaagttgctctccaaaggacgaataagcaatatatgacctatctctagatctatactcatgaatattcttgtttgaccaagtccggagacacggatcaacaggtacgagagtcaggccatatcagaagtttagcctgaataactcggatcgggcagatttattaaaatgatcgaatatcggatgtgtatctatttaggcaagccgtacgtgtagtatgccgggtgccgctgacgtccttaatatattaatctatggcccagccggtatccgagggctgaaattccttggagttcttgagacctacgtatgtaccagataatccctggcactcgagacctttccctttcccttttagtactcacctcttgccgctttttgatcactgagtaaaaatgagcacgtccctgagtaccctaacttgatcacgggctattatatgccagaatctcggatgaatactgttatttttcatccctgatacagctaggtcacgtgattgaccaggctggtttttcgcccgaaaaacacccttttcttttcttttatttgttttgatcactaagttgtctatcagattgtcatgttttaggactattattagttttagagagttagagaatttattgagatttttcctgctatatatacactcgccttaccaccgttttcccgtcaagttccaatattctatttcactatcgatatcaattctattcatatagtgtttctgaaaagggctagctaaggtcctagcacggaatgcgacgatatattaattcaagttctcaattttcgcattttgatcttctgtcagagttttccattctttagcgtccttcaaatgttccaacctatgaatcctctggtccacaagggcattcactcgccagcgatcctgtgttcccttcctcttctggcaacacctcggcactgctagtaccttcttcccaataaactcagtcggatctactgcaaatgaaagccatgtatttgcataaataccattattatcctcaatgtcaatgatgttaatctgtaagacctcggggttgatatcgtcagctgggacaagatggtcaaatgttataccataatagtcaatcagcctacttaaattaagaggagagaactgattagccatagggccatcagagctcgttgcctccactaggagagattgacttactcctccggacgcttctccgacatccagcccaggtattcatcctgcacccccagatcacccgggacttccggacaaacatcccgtccgtatatagtctgatacgttaaccgtgctagctctgggcctgctggctgtgggaatgttcggtctccaaactccagacgccaatggatatgtggtaggagtctttgtatggcgattaggggaccttcgatttggattctgagcggctgatcagatggtgggaggtgataccggccggcgggtgtgtgaatacaatgaggaatgtaaagtgggagcgccatagatgagaccacttgattgctggagttgattgaggaggcgcagtgactaaacccgttagtgagtgtaatcttggaaagagagggcactagattaggttcgactagcttttttatatgcctagggaagagaactacgatatctcggggcttatcatatgacttggatccaatatcttcggctattaaaaccttcgaagaagtatggcgctgatgtaccgattaatacgccgctgcctggccgtgccaaccaaccaattaatttatacctgatggacgaagcgcttcgctctgttttcctataggactatttccccctgcaaataattactgatagaaatctaggtatggcgagcgtacgggtaaaagtcataatggtagaattctttaactaacaaaataaaaaacggtccttaatgaaaattagtgcggacaaaattatgaagcaaaaatatacacctatgtacttttccggtcctaatattctctggtaaaaagacttggtaattagcatttgaacgcactacctcagttcttgataattacccctgagtgtgacgtaccctggttgatttcactctgttctgatcccgccccctgtgactggctgtgtatgcgctgactgaatgtgcaccctaggcgctactttatatggtaaaaactctcgcgttgtattgccccagaccaatcgcatgtactggctatttcgagctgggattactcggatatcacatggcgtcatttgagaataatggttgcggcggcatcccatacaggcgaattggttggctggcgttaaggtaacactcacggcaagccgcgtgttatgttagtgcgaagtggttagttgcctgtataccattttaaggcgaccctctggtgctaaggatagaggtattggcctctatcctctgccagccttatccaatcccctgcttccgctattctggaggccgtgtcattggtatcatgcctgctcgaggtgactattattactcagccttatggagatcagttctcactgatgtgcctgggtcttttaactgatcctgacctgaaatcgcggggagaacctctgatagctcctaccccactgatggggtccttatctccgtctctatgtgcccggcgccaagaccgctcagccacgttaagtgatctcctggcctagggaaacagtctcgccccatgcatgcttgtgggccaacgatttgatgttgttggatgaacgcgcgggggaagtgaaacagtctagatgtcattttatggcatcaacctagtttgagaaatggtggattatggaagatatcatcctaattacgcgccgaagacctgatggcctctggtccgtcgataaatatcacctgccatctatcctctggagcccagctttatttctcatttcactttctactactgttccatccctgccacacttgcacccctcttgtcaccttagcacaccaccgtatgtacctccgataacctgccatgcctatatatggtttccattgcatgcgccgtgccgctaaatatgtgtgacatttacactgactactgggaatgtggtcatatctatctcgtgcgcgagcatccttgcccccgcgttggccgttgcgtccgccttatcaccgtgtggggataactaagcctggaaactgtggtgctggaggctgcatgactcccccgtcttctgactagactctccgtcgtggccgttgatcatctcactgcctgactgctctgccgccctctctatcctgtttcccgtctctcgtccgcctcctgtggctgtgggcccgcgcaccttggcccatcccaactgggacggggaactctttaggactggctgtgactggcttgattacacagtctggttcatgtgagctctattgtgattgatctactgtctactgtctgtctcgctgttcctacgttctttcttgtggcttttttcctacttttctgtctcttactttatctgtattttgctggagggatatgtttgacttggggtgctggtttctgtgttgcccggcttattttgtgctgatttggattctgcgaagtgtattatagctattagcatgagctataagaccacactcatttctcagaaatcatcatacagtaggtacaccacgacatgcatgcttaataggcatgaagaagatttctcttattcctggtgatacttcgttattagttgctgcgagctcgtacatttttatttcttagtcagtttaagtattttttttcctacataataaatgtaacgtgatcatttacccccaccattgtcgtcccgaagggtttgcagggtttacactaccttatggcctcagacacggggggttgagtgcatcggtattactcactgattagatagttactgagtatcactgagcacttactggcatcagtcattctgcacgtgactggattgagcatgatcactgatctgagtccatgctgacatctactcagtgagcctgagcctgagcaccctcataaaagcggcggcagatcaaataggaaagccccacccgccagggaaaatccggtacgtatagttacatgttgaagaggggacccctgaggggcaccgacagccctgcctgcgaaacaggtgtgagagcagagtcgtcactgggagtagtagggtgctagagaggagaacaccatggggtgactactgagaagagaggtggaaaggtgtctgcgttgctatctaggcctcgggagtgcttttatgtcacatagccacttagtcatcctgctctggaaacccccactgcaatgtatacattgtagatattaattgtttatttccccaggtgtggtgccggaatatttattcccctctgagcctcgaagattgcctttgcatcatcgtactttcaatgtaacattttccattcactcgggtccatgcggcgttttgggcgtgtttggcgcatgtcataacaaagaccggggtgctcttagttagtctgttctcattggcccagactactcgctttgagggcatcccgtctcatttgctgccgggaggttgcatcggtcttggctggcttggccatgtcttgcgctatccaaccgaatccgttttctacactccataatatatcggcagtggcagtgtgaggagtataatgagtagatgttcggatcaaatcggaatgagaaagaaaccacctgcaaatacaccaaatatggcaatatcagcacgttgctttgggttgcgccataacaagccatgccgctacgcgatgactccctgtacttatttcctcgacaaagcggtaaattccagaaagtactgaatgtatagagttagcgctgaattcgtctgaccagtcacaatccagagaagacgcccccaactcctttccccatgaaacttccctcatccccgcgtcgtccgacgccttccccgtatcttggccagccccagacattggagatccccccggtcacctcggattaccgcttttgtgaatccggaggaattgaaagtggcctatataacccgctgatcggcattcccatcatgtctgtaatttgcgatcttctcaggtgtgggcatcatgttcggcattccgaagttctttggctggagaggccggtctctcaacctggctatcagttcccttggtagtctggacttcttgtatgatacaattcaattattattctgaaactggcaactaacctataaggctatttggttacgatcaaggtgtcacgggtggtctgctagacctgccctcattcatcaaatacttccccgatatcaacccactagatccagccatcgccgataacaagcccctccgatcgcagcgcagtctgaaccaaggcattgcagtcgcatcgtacaatctaggatgtttcttcggcgccgtcttgactatcttcatcggtaatccgctgggtcgacggaggactatcttctgtggctgtatgatcatggcgactggcgccctattgcaatgcaccgcgtattccctaccccatttcattgtcggccggattgtcactggtgttggcaatggcatgaatacaagtaccgtacccacctggcagtccgagtcagccaaggcccacgatcgtggcaagatggtgatgatcgagggtatgctcatcacgggcggtattactcttagctactggatcaactatggtgagttggacccagtatgtatgtgacgatcaagtcgcaattactgatataatcctgaattaggcatgtcgttcatcggagaaaaagaggtcgcttggcgattccctctagctttccagattatcttcgctatcattatcttctgctctatcctcaatctgcccgagtccccaagatggcttgtcatgcaaggccggaccgatgaggctttggagatccttgaatgtctgaatgagaaaacgcgggatgacccctacatcaagaacgagctcatcgccatcgaggaaaccgtcaaagaaatgaacaagggctcttatagaagtctgttcaagatgagcgagtatcgagaattccatcgcgtggcactggcctacgtcaaccagatgttccagcagatttctggaattaatctcatcacctattacgtgagatcccctctctcaaccgagatgctatcctagccctatactaatcaagtccactaggcaccttcactgtacgccgagatcggtcttggaagcggcaacctcccaaagttactagcagcctgtaacggcacagagtatctaatggcagcatttatcccgattttcatcatcgagaaagtcggccgtcgtccactgatgctaatcggcgtatgtcactcccccaaactccgtgcctatccatatcccatcagctaacaagtacttatcaggccgccggcatgtccctttcaatggccattctagccggcactaactaccgcctaaccgtcctcaacgacagccgcgccggcatcggacaagcggtcttcctcttcgtcttcaacaccttcttcgccatcggctggctgggaatgacctggctgtacccagcggaaatcgtgcctctgcgcatccgcgctccaacaaacgcactagccaccagcgcgaactggatcttcaactttatggtcgtgatgatcacgcctgttgcgttcgagaatatcggatacaagacctatgtcatcttcgctgttatgtaagatacgatcctatcctccccattaacccattgagccatgacttggaactgacaatagcagaaacgcattcatgttcccctgtgtgtacttcttcttccctgagacccgctaccggtcccttgaagagatggacgctatcttcaagaagtcttctaatgtcttcgatgtcgttactatctccgttaaggagccttatcgctatgataagcatggcgagctcaaacctgagtacctggaggaggctacccgccatgcgagcactgatgtgcacatcgccggtgcgaagtttgacagcgatgagagcggtcatgaggtcaaggcttgagtggttggaagatgtggttggttgtgatgttggtggatttcatttatacccgttgtgccagtgtgatttgatgctagtatcatttcactgagaatgttttatacatggcttttagatgtaaagagatgttaataacagactttctgcgtcgaattttgattaaaagtcatagatgtggagagagatatatataatatgcagactagcaaagcattaacggaaggacgtctatgaaaacggtaaactcgtcagtaaattctacatagctatgaatataaactatctgtgttggaacaagtttgaaggtccgggtataccagctcatctcagcgtgacacgcattttattcgagatcgatgtcaatgaaggaactcgaggaagatgcttgtaacttcgaatcgaagagaaacaataataaaaaagggtgtgtaagacccgaatgaaaaatgaggcaaaagaaagaaaggtaggtatgagaatacggcatctaagacacggacgaaagaaaaaaaaaagacagatgatatgattcagatgcggaaatatgcatccagcgcaaagcacagattcaaggagggttcgttcatcacggacgcgggctatagggatatcaagatcgaggcgaacagtgtggtcatattaggcatgctcatttccgtccagcggggccactgacacggcagcgagaatgcctatgttctgcataatatgtaggcttcctgcaagggtgaggtcattcagactaagcgtcccgggtagggaggggttttcgcgagattgagccggacggagaagtcggcactgaagtcggaagggctggaagctcgctggtgggagcaggggtaggtgcggctgatgggcttgacggtgaaggtgcagcgggagcaggctcaggagcggctggggaagtcaaaacctgcagtgcggcgggagcgggagcgggagcaggggcagcggccggagcaggggcaggggcaggggcaggggcaggggccggagcagggaccggagcagggattgcagcaggggctggagcaggaacagccacaggactcgaaacttgtggcacggcaggagcggtagcggctaatgggctcgaaacggcaggcgcagcaggaacagcagcagctaatggggtcgaaactgcaagcgcagcaggaacggcagcagctaatggactcgaaactgtaggcgcagcgggcactgccataggtggagcgacattgccggcgctattgctacgttggcgttggttgaccggcatcactgggcgctgcattcctggtccgtatggaccagggctcatcgaacgcgggccgggccgggggccaggagacatggattgtgggacaggtcgtcctcctggtcctggagacatggagcgtgggacaggtcgtcctcctggcccgggagacagagagcggggaactggcgggaagttgacagcagttccgggggcagggtaagggcgagaaggtggaggcccagagaagccagcgccgggggatctcggacgggaatcctgaggatagaatctaggaccgggcggacccgcgggcatcattgggcgaccgtcagggcccatgatgggtggaccgcgagagccggggccaggaggtgggcgggcgcgaggcatcacaggacgagccgagaggcaagaccgtggggcaactccttgctgggcgccattaaggcgcgtacaaagagcccacccatcatcgtactcatgaaccaagcgcacaagcgctcccgcacgaagtccaagctcgtcatccatagaggggttgaaatccagttgcacacggtagacattggtagggggtggtgggccagcagccatggcgcctgcagctccggcggcaccggcactggtagcattggtaggggtggttgcagattgcgtcgaaccagtgggggaatggccgcgtgattcggcggaatggtagagctcggaatcattggatgctcgagatgaagcagcagcacctgctgcaacacccaccgctgcggcaccgaccgcggcagctgcgacggtcgatccggaaggttcagtcgatccgggcggtccagtggttggttgagaaggtccagtagtcgatccagatggttcagtggctgattcagcaaccgaaggcgcgtgctggctggcaggggcgttgaaaggattgaccgggtccctgaacgggtcagaaccactgccagcagatttcggcggggtaggaggcgccgagtcaccagtgagattacgagaggcgacggccgaaccagctgcagcacctgcaacagcagcggtggccgggctcaaatcggaagcagcagtggcggtcgggttcaaggcgccgccgctcagatcaggcgcgaattgagtgacgggacgaacattaagttgcgggggtgtcgaaagagcctgtggcttggaaggaggaggaggtggcaaagaagcagcggtaccctctggcaggccttcatcaccgaaggtcttctcattctcccgctgatatccctcttggcttctcttcttctttcgcataaagaagaaaaccagagcagcgattataccaacgccgaagatgacaccgatagccacaccagccttcgcgccaccagtcataccctcagaagtagtagttccaagagcggttgtcgaggccgatgcggcagagtctttggccgatccggtggaggttgcggtggaggttgccgcgaggagatcgttgacatcctgggaagtttccaaggtggaagaaccagaggtggacgacgccgaagtcacaaaggaggttgtcgtgatttgagcctccgactcactagtcgtggtggctgtctttttagtctcagtagtctcagtggtttctgatttagtgtcctgagtggtgtgggccacggtctctttggtggtggtcggttcctccttggacttggttgtggtcgcctcctcggtggttttggcctcggttgtttcttctttggtcgttgtttgttccttctttgtagtagccgcgctgacaggctcaccgacaccggcgtgcacctgcgtcgtagtagtgggttgggcaccggttacataacctcccacctcccctgtaaaatccggcgccacggtcttataaacaatcacgacatcgcctcgctcctcgatgacacctcgtgcctcaacagttccttgctcctctagttcctccacattgcgtgcatggttgtgatgcgcatggccgtgcatgttgtcggctccagtatcccaggatacgtggaggggtgagggttaaggaaggaggttcgcgtattactcctcacgagagggatacgcccagataccaggttgatttctgagtaaccgcgtctctgggtcgattccagctatgcggaatgtgggtagaaagaatggacgactgagatcgagcacagccgatagtcaagtcgagaataaaagaaaggacgtcgacttccaggtcagacaaattgaaagaacggatggaaacaaagttaaaagaagcaaagagaggaaagagaaaagcccacgccgcaatacgaggaagccctggggaaccacgaggagccgaaatgagatcttgggacccttgtgtgtatacaacaacacgctagcccaaacaggcagcgatgcacagacctttcctggtttgattggctgtcatacggtgcctggcccgaaggagttacctgacccacgggcgagcacccttgcagccccactttcctttaagtggctgtggtgtttccaaggtttggctttacgaactgtagaggacttttaaggagtcttgttctaactagtattttacatatatacggagttctttgtatatccctagagtatagttctgcttgaaatacccctaatctatctatgctgtagatcgtatatctaatttaccaacactataaaatacacgggaagtaacaaatgccgaccccatttgcccgcccccaagcggcacattcgctaaagtgtgaggcccagcacacgggccaggggtcacactactccatggttgtttcaccctagcacaacagccacatttaattgatcgctcacggaggccgtaatttccggtgtttgccggaaattcacttttaatcaattcaaattttaataatgatgcatgacacctttgcgccattctcatgcaggtccctcaggggttacgctgcacccccaaggttggggacacgtattgatattttggtacctgtatgtaagatacagattctgtacaacataggcagtactccttacttgagtaccgagtatttgcatgttatagtctatcaatagtggattgccaaacgtgattaattcgctgttgcaggttccacgcctgtcattcccagatccactcgtgcggtatcacccgaggaggcgcagaaactgtggcgtagctccttcaggtgtatcataccattgcttcaagtctgagcgaaatagggatgggcaagggcctaatttactgtcagatgttattataagacattaagtcaagttacatacctctgttgccgagagtcttgcgctgctctcgtagcacaataggtggctgactaaatcacggccattcgaggatgcaccaggcagaatatcctcccagctctgcgtcgggaacgagtagaattccactttcccccaatctggcagaacctggacttcctgttcaatggttattaacgacgtttccatttgccataggggtgatgcttaccggccagcgctgttcatccggagtacccagttgtttgaagatggagaaaatcagcgatagatcgctgcccacaggcccggagtcgaagagctgacggtgaccaacggcaatagcttctgccactacacagccggcagcccacatatcgagagctgtcccataccctttgaatccaaagagaatctctgggggtctatagcaggtcgtgccgacatccgtgattttctcggtgggcggctcagatcccgcatcgccttctttccatgagacgccaaagtcggccaaatacgctggtccgttgggggagtccatcaaaatattggaaggcttgatgtcccgatgaagtatgcccatgtcgtggatatgcgccagggcacggaatagatctcgcagaatcgatcgtgtttgagcagcagttaccatgtctcgccggagcaacttctcgaagtcatatcgcatgaaaggaaggaccatgacaaacctgccgccatcaagattaaatgtctcaatcaatggaattatattggcgtgcgccgcttcacgcaacaaacgtgcttcacggtgagcatcatggggggctgtcatcatgtagggaacagtgactttcactgccctaagggtcccgtcttccaactttgatttgtagatggtggagtgaataccatcaaagtggtggaaacaggaccgatattgaccgatcacttcccctgttgaggcctctggttcttcaaagtcattctcgtgctgtgggctgctgtcgacctgtttttcagaccctgccaattcagcttgatcaattgccttttggcagatagaatcatattcatcctaggtggattagtcccagttttcacgcccgtcccaaaaaggtacaccactcacttttgaagtggccttgtcatacgcctcggtttcagtttgcttggcttgggccatagcttctgcaaatgcggaggcaggcgaagaagaagctttctggtaagccgatgtactacacgcaaatcaatcgagtgtccatgttgatatagatgggaaagtcgcttacagagattgtatggctcgcagccggtctgtgaacccgaaattatccttccaagacatgatgtaagaacactgctaatcaaggtagtaacttctaccctactgccttgcagtttttatggcagtgtatagtcaataattaaagcaacgtaaatatagggaagatctattctatcacctgatgaagagctatcaaatgcaacctgaggcagcaaggcgccaacatcccgaggtcaaccgcgtggatgatgtcaagtgaccaatcaaggagtagttacagttttgtgacgtaagttacagacgctcaggccgttgttgatgatttaatactgccaaatactgtattacaattacaatctccgtcattccatccccattgccgtcttcggccaacatcgaatgacaccctaccaactgacactggcattcggtccccgcattcatttcccttacttgattgggcccttctcgactggaggaaacttttggttttctcttacatgttatgcgcttcgtgcgctaccttgctcagtacctcaataccccggaatctgaatcatggacctctcaaggcaagagtatccaacgctgctggtaagattgagcaagtcgagctacaaaattgacaagcaaagcatctagttactgatcgttgacggtgtctcttttatttaggctagcctgcatcccagccaagctacaaccgtcctgagcgatcgcatccgactcataaacaaggtcaacacggatatcgcggattatctacaggtatgacaatctgtcactgatccaatcagattcctggaagggatctgcaacggggagcgacattggtgttgacatactggcaataggagcgacgtcgagttgaagaagcatacgcccaagggttgcggaagctggcgcatcggccacagttggacaatggagctgctcttgggtaaattgacctttccctggaagattgaaattttttgcatccggtaatgatactgacctgcgaaaactagcattttccaaatcccctggcaacgcatcatcagtgccaccgaaaccctcgccgtatcgcacgagacccttgcgaacaagatcgaggaagatgtcgaacgaccactaagagaatttagcaccaagaatcaggagatgaagtcgttgcccggtatccaaagtagtctggcggggttggcgaagaatgtggagactgcgcagaagaaggtagacaaggccagggcgaggggtgccagaggtgcagacaaactttccagcgagattgccaatgccgaggaagtccaccagcaatgggattcgcgggctccctttgtttacgagcaactccaggcagccgatgagacccggctgaatcaccttcgggatgtgctaacacaattggagactcacgaggtggatcaagtcgagcgtggtcgccaggccgctgaaagctgcttgaacatccttctgaacgtggaaacagcagatgaaattaagacctttgctgcgagaatggcgggcccacgagtccctacgcaggccatccctagaagacagactgaaccggcagagacaactttcccaatcgaaccagtatccgagcggacacagacagcgccaatcgatcgtgaattctccacgccaacaacagaggctccgcttccgtcccttccacgcacccatgatgatgcggaaagccaactatcagaggcatccgagagaaccaccgtcgctccgacacctccaggtaagttctacagtcgggttccctatgaaacattgagattctcatgatttatctagtaccagaagcacagcaacggcatactcctctggggggattgagacgtcttggcactgtcatgaacaggagaaagagcgttgtcttgccttcaactggatctcatgaccgaaaggcagacaagaaacgtagtccctttgctgcattcatgagagccgactcctctcgcgatatgcaaatacctgaatctcctcccgcgaccggtgaccgtccgggaacatcctttaccgatcaatcatccttgcggaatcctagtatgtcgcaagaccgtgccggattagatgctggggcaactatgtctgaacactcggagaccagaaatggagaaaccaataaccatatcaatcaggtaaattaccaaccagcgagttaattaaaggtgccaaccactgactgtgtcttgtttagccacaggttgatgccgaagggttcactcaacgccctgcaacaattgacgagatcactcgtgcccagaatgaggcagcggggtatgttaccttttgccaacggtgatgaacgaatgctgacaatatcactacagcatagatgagtctggtctaaacttgacaattcgagatcagcccatcttcgaggatgagaatcaagcgaagcgagccatggatgatatggcaaataccctccgaatggttagtaacaggtctcgccattgatcaaatattgtgtatgatacttactctgtgtacagcgggctccgcagacaggagcgagacgaaacgcaggcactattcggggacgccgtgacgtgcgcaatacaatgtttattgcttcgcctagcaatgagcctccgccgtcttcggcaggatcggagtcacagccaccaacctcgccaatcaggcatatcacctcccccagcattgcccccagtacggatgatcacgctatgtcagatactacatctgttcgctccggacatggcccgggagcttctatccatcctgatctatatgaatccggcctgaatgcttcaatcattgagaccatcaatgcatggttctcagagggtaatgtcaccaagtcctttgtcgttggtgagcttgctctggcaaacaactccccgcctggtactgtggtagacaatgcgcgcatccgactcgataacttccaagtgctggaaaaggtagcggccaatccccactttgtccaggaggccaaagacacaggcgatgacagcagaggcgaatacgatatccagctaggcaacatctcccgccccatgccgacagtcgcattcaaatatcaactgcatatcgacccaagcaacccctccgcctactgccctgtgatatttaatccagtgtggaacttagaagaaaaacaagccagcgccatcatctactatacgctcaacccatccttcatatcccacacaacggagtcaattacccttaagaacctagtcttgaccatcaatctggacaccgcgaccgaggacaaaactaccaagcagccgcgggagtccgtcgcccacgccatcagcgccgccatgtatcccaataccggcgccaccttccgtcgcaaaacctctaccgtcacatggagaatccccgagctggaagtcaaggctcccaccaccccaggcgcagacagcaagttcctcgtccgcttcatgacgtccacccccggaccccgcaagggtacagtcgaagcaaggttcgagctccgcggcgctgaatctgcttctcagcttggtatcagccgttctgcctcagaaacagaacaaaaggaagccgaccccttcgctgacgatggccgtgattccccgctgtccgcgacttcctggctgagcgtcccgacttcacgcaagctgatcggtggaaagtatgtgtcttcctagatatgtcttgcgcaatgcgggatggaagtacccatgcttggtcgtatatattcccttcttccgtgcaatccttatgtcacttattcgttgtttggatcttgtgtgtcatccctccagacagggccccaaatcagagcatcaaaagcttaggatgccattacttttttcgttttgttttctttctgcctttccctctttgtctcttgtattccgagtattctcttttcaaataccgatcttgttattcgtgaagtttgttgttgtctgttcgatttggatgttgttctgtgtagtcaggcatttgcttcgcgtacatatgactgtttcaaacacatttagatataccagtacgtatgtagtagtcaagagcattaatttaggaaatctttttcgacccgtccaaaaattgtctgccatcgaaactttgaaagctttggagagtgctttgaaggtgtaaaaaaacaatccaagtttataagattgagttattaagccagctttgagttcgttcctaatcagattacaacatacgccctaacctcggtgcgatatgcagcctctgtggcttgcccttttctcatacctgcttctctattctcgaatattctagaacgagatcaagaagagaagaaacatatgtaatccacagaaacgctgtatctagacctttggctatgagactactaagtctaccgcagcaaccacagagctaccggagaagcgctttacgatcacaaccactgctccttgttctcctcgatccaggctttgaagtccttcatcccagggtagagctgacggcatgcagtcacatcacctccatacccttcatgttcaaaccaacgaaacatatcacccacggtaccttttaacaaaaacttgactgtagaagccacagggcaaggagccataggcataggtgatcccacaacagccttgaacgtcacatcagcctccctttgagtaagctcatcgccaaccagtgtcagggcaacattgcggtaatcatcaggtttcatgaagctgtaagccgcgacccgaccaatatcccgggtcgagacgaactgcagcttcttgtcccccatttgctcccacatgcgggcgaagcccttcccatggatatcggtagtgagattctcaaagaacgtcacgggccgtaagattgtgtatgtcatatgttgcggactggccgccgctctttcgatcaagtgattttcgatatggtatttggcagcaaagttcttgactttggtaggattaacaggcgacttctcagggccaccgcggtcacctgacgagtagacaaagtgttgcacgccatgggcgaccgccgcgtcgacgatggccttcccttgctgctcttcagcgtccgagttaacctgcacgctgtatacgccccatacagggccgactttttggaagatggcctcgggctgcgttgtgtcgccgtccacgacggagacgttgaaattcgcgccaagcttcagcgcgcgggggctgacgatgtcccgcgttacggcgacgatgttgagccccgccgtgtcgggggccgagaggaggctttggatgagggcgccgccttgcttgccggtggcgcctaggactaggacggtctttcgcggggcagacattctcagatttgaaatgataaatgatcaagagttatgaactgaagttggagccttcgctgcactccaaggcttattgactagctttggggcctgttattgcgctagaccaataatggaggaacgctagagctagtaggggtatgactgcatttgttgctccgtataagaattagttttaattgtgtatcagaaatatgtctacctagccaatagagatttcccataggcagcaactcaagcacgctgatatctaatagagaaccaaatgagttgggctagtctatatgcaatagctatcggaggaaaagacaaactcaatctgacggacggcgagaatggtatatggattattgtagcgcagtggctcatatgctcggtgaatctatttatgtttacactaggcctgaagtaatgctatatgttattgggatctatataagctttctttctcacattcaattatgttgcgcccacgaattgatagagaggaaggagtggaatatgtaagaattcaagacctgacaaatataaaagcctcaacatagaatcgttcaattgcaatcgttctcaaactcatcgtcaatgccgttcccgatctgctgctcgatgtagcttatatcgctgaattcaatacatccaaaaccatcgtaacggacggtctgattatttgaatcaaagaatcccccacctagactgtccaagtaaatctggaatgctatcctaggtccgcacgtcctaaaagctttggtcaagcgatataaccagcgccctgtcgcgtagggatcgggggtcaatatctccctgcggaaggcatctcgtagtgtcgaaaagctcacttcctcgacaccgtgttccaggggcctcatatcttcgattctccaagcgaggattgctcgaagtgagacaatcctcaatatgtagtcctcaggtatctcccattcaaatagatattcatgtctgaatacgtttgaatccagcccaagctcctctgcgagcctctgagcatgatgtgggccgttttctacatcggcctttggcactttgatacagatgatccatatcttgtcttcattccgggagttgtacttccccagagcacgattcagagcttcaagaggacggtcggtgacagaaactagggctgtaggatggccattccacctatttcgatgagagtcgaattcggagaggagggcgtgttcagacaatttcggacggccaaagtagttgtcatacgctccggatctcagtccaccagcactggtcaaggagaagcagcgataaaaatattgatgtttcatggtgagatggttgtcaaaggtagagactacgaaaagtaagaagaggcagagagggtttcagccttgaggggattaggctgcaatgcataatagtatatatatcaatgtattgggtacaaccccggttctttggtcagtaagaaaaagtacatcctaagagacgctataattacgagcgaagtagattatcacagaggggtaaactatcctttagactcttataggctgcccagaatactgtactttcatgcttatctacttttcgactttgtgttccccgattgggcaaggggtgtataggcttgccctccccaggatcaaaaaagcgcaaatggaaagatatacatagttatgcggtgtcggattaataattgctgcatagaataactatggataaccgatgacaagacatacaacatagcacacattgacatgtgctggggaatcacaaaaatacagatataaaaaagtagaaaaagccttagcgaacatgatactgatcccacatatcacatcctagcagcgcgggtggtcttatcatagaagtccaacgtcatggccgccaggaaacatggaatatcctttctttcttccacccagaatttgatgagaggtttaagttccatggcaaacagactattcggtccgcccgatatcttcatggtgccgttctcgccatcgaaaacgatagaattttcttccccattgcccatgctgccaggaccagagtcagaaggtgcatcgcagtcgccgtgccgataagcggaggaaaggtgaaacatggaagtgactcgcactctaccattcggcaagaaatcaagcttgaagccgagaagagaggcgacggcttcccggaactcagaggacttagctgtccagatctccttcaatcggcgcatacgcttttctttgtcggcaacgatgcgctccatgtcttgcatttcgagcttgatgctctccacggtgctgaccgggacaaatttgacatcggtacggcccccgcgcagctgtgccattagatctctgtttgcagactggagggttgcaagagtagtcatcttgatttgctcggtttgggccgtcggattatcgcgcagttcaagaatgcgtgttcgtgacttggccttcaaagacttaatctgtgatttggccgcatccagttcccggcgagcgagagtcgtggcctggtctgatttggtgagatgttcctggagcttgcggttcttgcggctgagcacagcgatacgctcgctttcggcttcgctgttagtcggagaaagagctcgtttgacgcctctcgcctcttctttcggtgtagcttcctgcttggagagctcttcatgaactttgtgaagctcactgcgatattcatcgacgagttgttgcagctgggttatttgttcggatttttgttcatcaaactgcgactgatcttcgttcattgtagcctcttccgcatcaaatgtcttaagttgtgcgcgcaggtattcaacttctttcactgcaagcgcacgctgacgctccagtcgagctcgaagccggctctccgcggcgaccggtcctcctgcagaagcggcacccgcaacgcggagtttctccaactcccgttgcagattatttttatcattttcgaggctcttgatagcctcgtccttctcaaggaattgggcatcaacagttccgagacggtcaaggagcgtagcgatctcaattcgtccttgaactaccgccctcacgatggcatctggtgagtcaaattctgcaggctgctcgttttcctgcaaaagactgacccaagattgtcgctcatcttctaagatctgcttctggatctgaactgtattgagttcggcttcaatgcccttcatcaattggagctggttctccactgatctcttttgttcttcgacgacttcaacattcttcgaaacttttcgaaggtgacgtagctccgttgtttgatcacggtttgctgactccaattcccgaatatgatggacttgctcggaaagttctctctttaatacagccaaaacctcggcatcgttcccttcggccttcaatcgaatattttccgcttcgagctcggcgacctcggcttcacgctgagacaatttctcctgcgttgattcctgcgatgtcctggcattttgaatatcggtctggaattcctcgatggtcttttgtagagaagcgcggactgtctctaattcgttgatctggtatttgaattgccgttcctggtcggaaagtcgagcctgagtgtcgtcaaactcttcctgcaagttctgattatcatcctgaaggcctctaattttgcgctcaaacgcaagtttgtcattcaaggcctggtcctgaatttctttcaattcctttgcgagttcgtcgctcttatgggtggcccgattactcgaagattcggcagtctgcagcaaatattgtcagtttgacctcgtgaaaatgaaaattttgtagcagctcacctgagcctttcgaaaatccgcatccgctttcagttgcaggtcgcgaatctctttttcatggcgaagagcctccaactctcgttcctgtttgatattctcgagctcgtatttgagtgtgctcaattgcacgcgtagctcatctttttccgcatctagacgggccagtcaggtatccgtcgaaggcatctcgactttatctgagcagggtatcgtctcaccatgaataagttgatgggactgggcttgagattgtgtgaaacggccggattgtcgcatagtagtcgatcggcgcatggtgctccgtgaaccggagggtgttgggggtgagccgaatccagcaacaagctgggaagctggtcggttattctggctatggtccatctatgaaaagccaggagaggtcagttgttgcgcaaaaataatatggagacccattagagctcacggtaaggttcaggctatcgtaagccccacggaaattccgttctaatgcggcatgaggcgagaaggactgcacaacttgtcctggagccgtatcaaagggaagatggttaaaggcggcaccgccttgtttaggattatgtcagcggtgaacttcacctcaaaagggattagcgcctttttaaaaattatttcgatttcggcatcaaattctcagttcaccaccttcacccgtgactcctctcctttcacctcggtctctcgttcgattttactcaatttcttccgcttaataccccacaaccgctacaatgggcaaggacaaggtcgagaagaaggaccgtgctgagaagaaggagaagcgcgcggacaaggacggtgtgcacaaggtcaagaaggagaagaaagagaagaaggataagactactcttgtcgatgcagtagagaaggagattgtctccgagcccatggagggtctcgagcagaccgctgttgtcaagagtgaggtcgacgccgttgtccccattggcgccctcgtgccgttcgcccacccattggttgaggacaagcaggccaagaaggttttgaagagtgtcaagaagggtacgtggattgtctttttaagtttttacttgcctcttttactatctgtgcgcatggtcgattttcatcggatttggatcgcccatattcactgatcgcatgattgcgcgacttttttttcttatctccagattctccatgctaaccttagttcttctagctgccgtcaacaagtctctcaagcgtggtgtcaaggaagtcgtcaaggctctccgcaagtctcccatccccgctgccaatgctgccatcggtgtccctagcggtgtcgtcgttctcgctgccgatatctcccccatggatgttatctcccacattcccgttctgtgcgaggaccacggaattccctacgtctttgtcacctcccgtgctgagcttggtgcttccgctgccaccaagcgccctaccagtgtggtcatggttacccccaaggctgccaagggcaagaaggaggatgatgaggagttcaccaaggtcttcgaggagcttgctggcttggcccagaaggagatcaagaagctgacagtctaaaaatgttctcgacttgtctgctttaccttttgttatttgctcttcccacgctgttcactgcgagtgggttctctggttgtacaggtttctgataccgtctgttcagacggtgcatgtcttatggggtccggcctatgggtatctttctatatttgctgttttgttccatctcggcgttatttcaatggtgtacgaaaaagggcaagaattccaatgagataccaccaacctgatagactttcggtcatgagtaaggtcttgggtaattccaatggacatccatgcaatttccagccattgtatttccccgcaggcagtgtgacacctgcatagaccacgttatgcctgattgttgtaggagttgatctagaacagccggctccccttgcgtgatagataaacaggtcgcacatgaaatgagtctcgaccccttccaattttcgatagtgtcttaaggcagtcagccctacctaggtacatttgcgcgaatgtaatcagtcacacagcgtagcgaagtcaataattgtactagcaaatcgggtcaacacagcgctaaatatttagtgtgaagagccaagcctagacaattagccttgcatcgtaaaatgaactattaacgtggcgttctatgtctacgccgatcaatatgatcaatccctacgcccctcgaccttgacattgaacaagggatgaagtacctaccccaagcgcagcagatatcagtatcagcccaatcaccatgcgtagcgccctggatgactctgatcctctttcaacactagcctaggtctagggacgtatttggtatcaggcaccggatctgagaatcgggtggtgacttttgtcctacgcttcttccttgtgatcaaggctttatctccccctgtccttaaaaaaatgatttaaggaactatacaccctcattatgcgtcgggcaaatcattctttctgcatgtacggctgtatcatttagccaatttcctttttatatccctggaaatgcatatcaatcgcccctccttcctaacactcgccctcattttggctgttactcaatcaactgcatcccaccccatccgaactagcaaatgcgtcaagatggaacaattccaagaccccaatgctcgtggaatatggaaggtctttgagaaacatgaagaaggatatgatctattaccccacccaccgcacgtcaaatacaacggggtaagtaccaatcctactatgtatattgtccactcggcgacttacctatagccactatagaacccagcatggccaaccaacgaaaaaaacgaatcaacagagcaggacacaccaaatgatcgatatacaacaggaacctccgaatcgggaaagccagtctcaatcctgattctggaatccccagaaatacccgatcaaatgatcctacaatacttgcgcacaaaaaacgctctaaacaaggagcacgaacacacctcgcctccatctttctcccactcctcttcgggtccatcccgcttcaccttcacaactttaagattgaacttcccacagtatcctcttccgggggtttctacgacagtgattactctcctggtactggtttggattgttatgttcaccattgggctgcttgaattggcgaattatctttggagacgaagggaacaagctttggtgagagagtgtgttcaaggtctgtatgatgaggaggaagatgtgggcttcaatgagacaacaaagatgcccttgaggatagttattactcctccgcgaagcaatggactgtgctccgtgggagaatacgaatatgagttccttgagtctgtttctagtgactatgagtctgactgtgagtcggactcgggttcggactcgggttcggaatctgatgagtttgattatcgtatcttttgatagatagatacaggaatgacatgactagttggctcgatggtatgtcttttctttccaagtagaaaaaggcttaaattgtgaaaactgctcttttgtctaacctttgatacatctcatcgttattttcgttgatcaattattgctagtcttataatagaatgcatcgaacttgacaattacatggcagaatttatggaattgaaacagagtaagaataattatattttcaggtgttactgtacatgagtatacgcagtcataaatcatagctcatcatagtcccagcctaggccgagcccagtcaaagcgagctctcttgcatgatcccaatacaaatatgaaactcgttgggccaaatctcaaacaatagactcaaatacgctggtcactctgtaggtgctcatatacagtatggccatcagcacccttctgatgagggcgggcggagtcataagcactgtgcgcattactgcgctcaaatcggttgatagcctcacggccagggtcctggctggagccgatctcagaatcgaagctgacattcttagaattgtcggagggcaagccaccacggttaatttcggtcgcgccgacgttgggctgactcctaccaccactgccgccggtggtagaatattcgccagctttgatgcccatttccttcttggttgcagttggaccaccggcatacccgttttctgacattgtgccagggaagttgccttggccgacaacgcattcggggtacttctgttcctcatgacggtcctggcgttgagcggcggtttgggcggagggaagcttgatggaggcggagacgtcggtgttgtttactgtggattggtctcctgagacgcccatgggctcggcaccacggttggcagagaagctgccaccgtggcggacagactcggcggcaagcgaatcattggttacaggaccagatggttcttcgacgggctgttgtgaacgaggatcgtgggtgaccttggtgccacggttggtgggaggaagaggagtgccttgaagatccatgatgatttgattgattgaaaagggagaaggttagattgaagttggtgaagatatgttcagtagagaagagatgggagataattaattgataaactctacatggccgtgatggcagatctatataggaaaccagtgagctatgacccgtccgcatgttggaagtatatggttctcatcgaactacatcgtatattaaagataattgatgtcatacttacgttaactaggagcatttgcaagatataggcaagctcgatttcttggctagcagcagtccatgtcgactaattatatttgagatactctgtttggtggctggagaaaccgatcgaactcgcatgtggagaacatgctcctctctgatgtattcatgcctccaaaggggaaactatgcccccacctcttatccctgtatctcctgagaagcttgacgttgagaggcgattgacgtcaggtctagaccctggtatgcaaacagtgcaaatatctttatctttactgctgtgcaatgtacagtcttggcatttaattttatattttgttcgatgacggcatcgctgtttttcatagcaacagacttttatatgtttattgtacacaggtatagttttggcttaacattgacactacatgaaaccataggctttctagatctgcactattatagcctccgagtagaaaaaaaaaagaaagacggttggttttttctttcaatagtctatttgatatagtacaaatcatcagcttgaaaaatttgcgattaaacttcgtcgctcataacttgagagaaaaattgactacacataataaaccctcgtgatcacatattaacgggtcatacctagcatcagtcaaggtgtgatgtagtcctcgtcctcgagcccaagttcgttagcactactgccggcaggagcacttccacgcaggccactgttatcaggagggaactctaaacgtccagagccaacgccggtaatacgttggtcgagggaattccagtcactggcaactgggggttgatcaggcagaggcagattggccttaaccctgtcaatttgtgcggacttgtcggtgttttggtcgataatagactatagagcatatgttaggctatctgatttctgcttggcgttgggtgcagatagctcaccttcattctagagacatttgagtccgctggagggttgccaccgtgcaactgggaaagcttggactcggccctgcgaaggtcctggatggtggtatggaaggtagcgttagacattttgcgtccggctgtaaatttgatgatttaaacgaagaagtgtcagaagtggctgggtatgattttgaatctgaagcctcaaggcaaataaggacttatatatctactattttctctgtcgatggcaagacgctgtgacgtctgctacaatgacgccatggcatccaatgccatgggtattctcaccacagaaccatctttgacatgcttcatgttggttgggaattctaggctgttgggccaacagcagagtaattaactgggtgagtcttggggactggcatcatagatgatggaccacctgaggtggcgagcctgctgatgtgcttcaacgacaagatgctaccaagatgctacgcatatgatcccactcgaggcctgtcgaggagccaacggatatcttgaagctagacggccgagatgttctggacagattgtatgcaatacccttcagtccattgattgtcgatgttctcacacgtttcttggtatattacgaccgcgatcgggagccttcgatgaataatcgtggagggcatcatcttaaactcgatcagagcctagtacatcacctatctcatgtttgacaacacagcaggagcccatcctaatcaagcttgcacagacctggaattcaaggacgggtatagatatacagcggctagccataaatttccatcatgaattatagccaacagaccagatatcggtttctatcctcgagttattccataatgatttcaaggcgcgatagtagacgcggtatccactgaaggcttgaagagtagcggcgtcctaaagcggcataaaagcatgcaggtcatggctagcaccgccttcctttttagagcggcagaaaatgtttcttatcgaaagacagccaaccccgagatgcgtggagacttggtgaatcaggtcattgtgttattccaaggatcgtttgcccttcgacgcatctatacttcaatatgggtcgagatccgctgatcggactggtgggaaaggtatgttgttcccctccattgttctcacaccccactgacgaggggcatagccgtctagtggaaaatctacaacattgaacagcttgaccgatgcgacttcgaaagtcggtaagtgaaccgagatgcgattatgaccaactgaaacctaataaattatgttcggaacaggaaacttcccgtatgtgctccccgattgttctacatgagcatctccaccttatcgcattgatcgcgcagaccgtgttgacaaccaacagcttcacaaccattgacccccagcgagccatcggataccttcaaatcgactgcccatgccagcgatacaatgtttcagatcgctgccagcccaattacggagcctgccacgaagggcgacgttccgtgccgattgagttgctggatgttgcaggtcttgtcccaggcgcgcatcaaggacgcggactaggtaacaagttcttggacgatctgcgtcatgccgatgctctaattcacgtcgtggatgtgagcgggaccacggatgctgaaggttagttgggtgtgccggattgaatacaatggcgggatcgggtgttgataaatatcgcaggaaaggctactcgaggttacgatccctcagtagacattgagtggttgcgatcagagatagttcgatgggttctaggaaacttgatggagaggtggtacgtttgcaagtgccaacaagggaacgagggacaagtgctgatctctccttaggggttcaataaagaggagacatcaggcattgagtcagtggacttttccaatgctatttgttacaccgaactgactcttagcacagaggcaaaccctgtcgacacattacagaaacagtttgctggttatggaagtacccacgccactgttgcgcgatttatggataaactcgccttaaaagaaccattggaagactggtcaaatgagacggtggagcttgttgtgaacgcttttatcgacgagaaattccccactgtgttcgcgttgaacaagatcgaccacccagatgcagacaaggtacgaatatttagcttatggcccatatattgttctgacaggaattgcagaacatcagcaaaattgcgaaaatgcaatctcccgaaagcattgtgctttgctccgctatatccgaggtgttcctccgaaagctggcaaagcaggattacatcaagtacgttgaaggcagtgagttcatcgacacgcgagaagatttgatcgagatgggcgacccagacggaggaggcctcaaagagatggacgagaaattgaaaacgtatgttcagtgctcatataaatgtcgtacttttgctgactgacgtcgctctagtcgggttgagaacatgaaagatatggtgctgtatcgatttggatctaccggggtcgtccaatgtctttcccgagccgcagagcttctaggactcgtaccagtgttccccgttcgaaacgtggcgacattcaattctggcactggaactgctgtattccgcgactgtgttttggtcaataagtgagtactctctattagaaggctgacgccagtctaacatttcacagaaacagtaccgtcggtgatgttgcccggaaggtgatgggcgacgtacctatcaactatgtcgagggtgtgggtggaactcgagtctccgaggatgacattgtggcagttgggaaacacgacgtgagtgcccccactaactacataatacggttgattgactgattaccatggcagatattatcgttcaaggttggtcggtagaccagttcctttatgtacagcatctcccataatatgacattagtaatggaaatgtcttatggactcgttctctgctagaatcacaaatttggggcgtcgacttcaccgtcgagctcgaagaacgcatagcccatcacaagatactttacttcaacccccctgattaattcacagtcagcaacataaatcccctatcattcatatggactgaccttttgccgctcatcgttcatgccaatgattggctctggcgcattgggatgctcctccttagccttcttcccatgcttggtcccgcccctctcggtcattccctgtgacttgctgtcatctgcaattccctggtatgctctcctctcctccaatccagaggccactgcctctgaatgtacatcgtctgtatcacctttctgagacctcttgcgtatgtggtcctccgccgaactccctttccaatcctcgaagatggagtagtatcggaccccaagtggtgcacggagaaccggcgggcgtatgacggactgtaacggtaggatgacccgccaaggttggcgtgaaacagacatgttgtgcagcattgatgtagcagaaaagatacagtggttgcgcatagtgaattgcgagtaaatctaaatactggactcgccacaacgttggcttttatgattattcctactgcgtgctatgacgtccctatgctgcaatgcttttctgtccaaaaagggtaagggagccggttcgagcgggcttatcgataaggaatcgatcgtcatcgacgcgacattttaactaagcggacgacaccaaccgccaactcactatgaaacgcgagtatatcccgatcgaatccctgccagcctggcagcggctcagtggggtcgtcgtccaaggcatagaagtccacaagattggatctgatgaacatggcgcagacaaaggcagtgcgctcatcgcaacagaagcccagacaagcagcgagaacgacgcaaaccccaagatcctgctacaaatccccccggaattagttctctccctggaaacagtccataaccatgccaaaaccgacaggtatttgcgtgatgtgttggaggcaatcggcgactttggaagggtatgacccgggctgctcccttgtatctaaagggcaaaaccaactaagatacacagacagccagaggagcaatcctcatatttttgctcattcaactgtcccataccagcccagatctgcgctcaggacacgagaccatcggtgtctccaatccctggactgaatacgtgaagttcttgcctccgtcgttcccgctgcctaccttctacaccagcgaggaaaaggagctcctccgcggcacgtcgctagccgaagctctcgatgcaaagcttacttccctggagcgggagtttgaacagcttcgcgaggctacggagggtattgcgtggtgccagcggagctggtgggatgaggagaccggcgcgctgaacattgatgattggaaatatgtcgatgctgcttatcggtcgcgcatgctggagctacccggtagtggcctggcgatggtgccttgtgttgatatggccaatcatgtctccggtgatggggtcaaggcgctatacgatgtagactcggaggggaatgccgttctccagttgcgatggggcaagagccttcagcctggagaagaggttacgatttcgtgagactattctacgatggacgaggttgtggacttggctgatatagcatgacaggtacggggatgaaaagcccgcgtctgagatgatattttcctacgggtttttggaaagcggcacgacggaagcacgggggattgttctcagtttggatatcccagcggatgaccctctgagcctcgcaaagaagatgttctgccgggagaatccgggcctacgaatatcggccgttgagggctctgaagaggtgacctgggagagtgggcttgcgtggatggcatgcgtgaacgaggaagacgggcttcactttgggatcgcacagacaactgacggcggccaggagttagaaacgacctggaaaggcgagaagatcgaatcagcgagccgtctccgcgagctacttactgttgatcctctgtgggatattttccagcttcgtgctgtggtgctgctgctcgaacggctcgagacccagctcgctctgcttcaggagatggaggagatcatcacgaatttacgagaggacgaggcagatttggatttattgttccgacctggaatctttgcctcgattgcccagttccggaccttggaaggggagctgctggagagggctgttgagggcttaataaaacaggtcagcctacctgggtgtcttacagggcccccttcttatttcttgccactgaccacaacacgcagagaactgagctactggcttctcaaacggtggccgattatttcaaagcacaaacaggggagccggacgaacccgaagacttttcatgaatgcgagagcccagattgtgttgatgggtctaaaggccagactgcagagtacagactagacaagcaattaatatcgccacggacatgttcaggcatccgaagcattcctaaacatccacctcctgcccaatctcgttggctagcagcctgcagccagcccagtccccgccagatcatctcaaaaaaggttgggagccccaccgccccctagcgcatcgaactattccatgtgtagagactagcgtccaatgatgacgaaaggacagggaaaagagaggtatgacgttcctagtggaagatcattgagtggaaaaaggggtgaggaataccacgatcgtagggatctacgtactaccggcagtctattaccgtcagtgcgccagttcagattctgcctgcagcccaggttgtaccaatctcgcctcgaatattgtcgaggcgaattttcatgcttaaatgatcaatgcttaaattctgttagtgttacgtgttgtctatatttatctctatactccatagttacttagtatagtattatgatcatcatcataatgcatgtgacttctcgtttcatttatagtttagttatgatgtggaaattacatcttccaacagctaatagaaatacaagtacaaatagaaacaaaatagaacaggcaatggaaaagtaggcgaggtcaaattcaaattcaaatttcaggtattacagggtcaggtgcatgcggggaagccaagccagttacagacacgtccgagaatcaccgggctggcctggcgttttcgtaaacgaactttggccgcgacgatgacgtgaactcggtatgccagcagcgcgcatagtttcgagcctacaattggaaatgagggaattggctatggagtccgaagtatgtgcatcgtagctgtccatcgcgaaatctccacccgaacggagcccggtggggccgtgacttataaagtatggttcgctgatttctcggacaaaactcgctggacggaacagaacggcactgtggtaagcttaccgaatgaatacgaggcgtattattaattcttaaattgcccattacgagtgctctagtattgtcgaactatatcccgcgtccttggttgggcgcggatgacaacgactgaatcgcttcagttgataggtgcccaggtggagctagtagcgctagtcatataattcacacaaatcctttgaaactctagttgcatcggattgtttttttttccccgcggttgatcccttgaacgagttcgccactgcagtgaagtctatagattacttcattatctaatttaaaccttgggggctatcccggggatttctcgattctcgtaaattagcgtgggattgggtttgggcgtgggcgagatgacttcaggagacagcgagtggccaacgaataagatggtactttgtgcgcagtatccagggtgttcagtatgcgaaccttggaaggatcgcggagttatctcgtgcgtttttttgagtggaaagtgagacatattaaccgtggatggtggccgatcatcggaccaggatttaataggaagcctagccacacctgcgttaatcgacacgagctgcacaacccgggggaggaagtcggaagcgggttgggaattgcccgcaaccgggtaggattcgagtctgcactctaatatgtagcactcgaaaagtctatctcggtactcgatacagacatgtaacccttcgtttttccatattcccatccgcagataactgctgtccaaagagtagaatgtggagtgcggggaccgggaggatcggatccaaccgttcagacataagaaatgtcgactgcaggaagaatccggggcgagttttgagcggtttacggggtaacaggtatggagcaataccgattattagtttaccatacaccgtccagtttattggaaggctccgaggtcagcaggctccactttccactgactcagcgaccccatcttcccgaaggtcgcccccccccatgtttttaggcttctttctgcatacacccatactggtccaattcaaaccggtgattctttagttgcattgtcctggtgtcaataatccttatacacagtgcctgcgtacactcctggcgcctttcaaatacaaccaactcaacccccggtggcccgtgtgccccttctgcacaacatgcctggtatcttgccgatgaaagtgatcaaggtcggtggcactggcaccacgagccgtattgctcaggcctgtgaccgatgccgcagtaaaaaaatacgctgcgacggcgttcgcccttgctgctcacaatgcgccaacgtgggcttcgagtgccgcaccagcgataaactgagccgccgcgccttcccacggggatataccgagtcgctagaagaacgagtccggagcttggaaacggaggtcaaggacttgaaggatctgttggatgagaaggatgagaagatcgatgtcttgtcccggatacattcgtttacgccaccacaacgagccccttctgcaaggtctccttcagcgtgtgctacagtaaagtcgaatacttcggagtcgtcggatggcatgttccatgtagagcgatcgacgactcgaccatccccacaatcgcagaaccctttcgttggattttctagcacacagggctttgctggtatgttatgcgtttccctttgcaggagacaatcaacttacatgtgcagatgtgtttaccaacaagcttgtccttgaggggaaatcagctactaaggtgccgacaagagccctcactgccttgtctgccttggtattccagggtacccccaaccaggctgtgaagacaccacctcgcttggtgtcggaccagttgattaacatcttcttccaagaatgggcgccgctgtacccggtggtacatcgaccgaccattctaaaagcttatgagcagtatctcaacaacacagagaccctgcagcgtaatccccatgtgatggcccaattgaacctgatttttggtattgctgctctttcatcaatgtcgcgaaccaatcaagacccggctttctttgaagagaattggtcggccacccttgattcgttctcgagtgaaacctccatttccagtctgcagtgcttcgctcttggtcagatttattgcatgaccaaaggcgactaccgcaccctgcttcgctaccgtgccctgggtgtggatatctgccatcagctaggaatgcacgaaaaccaagaaagctcgggaaacccactcgaggacgagacttataagaaggttttctggtcacaatatgtgcttgaccgattctgctccgcgcttactggactgcctgtccttttgcgcgaagaggatatcgagactgagtatccggttgatgtggacgatgagaatgttacagaaacaggctttttgccgaccctgcctggcgaatccactcgcatctccagtgccatcgctctcttcggagctgcacggatcttgaacaaggcccttgcagatctgtacccttcaaaatctggttacgatgtgtgtgtctccaaaatgcgctcggtaacagggcaattggacgagtggcttcacacactgccgccacaccttcgtctcgagttcagtcaggacaagcctagcacgaacgtcacgagtagtcgctcgccgctcctggtaagtccccgcatggattcattaatgttggcagaatactgacctgttatagtcacttgtatactatttcattcgatctttgattcatcgcccagctgtctgctacgctgacgagactcttcgctctcagtctgttctagcggtgtccgattcagcaaagcacatcattcagattcttgaacttcttgatgagaggcgtttatgtctgtccgtttgtatcaacaggaaagagctcatattcctttccggccttggactcctctggcaaatccttgatatcaagaacgatagcaaactggccaaggatagccagaagctgcttggcactgccatgcaatatctccaatcagagtcgagcgcggcggctgttgaattcaacatgctgtccaacactctgattcctctggacggcggaagacgcccttcagtgagcaatcaacaccaggagatggtggcgccaacacaaaagccccgaaaatcccccaagaagcacttgcaggccctcaagtctcgccttatcgcctgctccacccgcgataagcagcctcccacccaacaaccctctcctcagtcctcccgccgtaacaccatctccggaaccacccccccacttcttccccagtcgctccgctcccctagctggagcagcctgcccctctctcaacctgaccatctctccggcccactctaccacaatgacaaggcgaattctcccttggatctagcctcagaccctcgcttatccgcatccttggggtacgaccactcacgcaacatgtcctgctctacaccctccgacccccaagctggtgtcatcacaatggccgattgggaatatgtgctgagtgacatggaccgcggatactccaacatcttcacaggcatttatggcggcaaagaatgcggcgaagacccgggtccgttcgcctcaattgcagcagaatacaaccgcaaacccaacgatccctccctagtcaaccacgcgcagggtgagatgcacgacctctcgcccgaggcgtggtccgccagtagtggcgacttcgtacataaacaagaacataccgcgcagagcgtcctgagctattcaagcgagagcatgggaagcgccgaggaatctctggcgccttatgccgatgtccgggtctgtcctgaagatatgaatacgatggacccgttccatacttttgctctgcatggagaatgagctcgatgagtttctttagtcgatgggtgggaccgactcttgtccgtctgattagttatatagcgctgggtgtctttttggaaggatttgggtttgacgcttttctgttctattcatgatacctgtggatgggggcgttatttgcgtttttttgtttcgatttctgtctggtattttcctccatctgcctttggtcttctctgtttggaaacatttttttgtctgtcgtagtagtacagtatgcttggggataggcgacgtctaagatgtcgtacacatgaatttgatgatgatcaaacactcgtttggacctaatcgcacctgaagtagatccatatgatccatataatattcctacaagcataaacaacacagcgcttcggctcttggtagcaatactttgcccctcgggtcttcctttccctagaggatattgttgtggaacatcgcatggattgtttgaaagagcagctatcctcgtgtagcagctggtcgatgagaatggtccttcataaccaattgcagtttgatccgaggtgttatgccgctgagtcagcgggaaattgagagactccctgagcggcatgattggtaggcctcatagtataatgtatcccagagatatcgttatacttatacttcgaatggtgcaaccacttggagtgaccaaggtcgcgtaaatatccatgggtacacagccagtaagaagcacagggatcggcttccgacaatccctataaatgcctcttcaggggaacatcaatcaccattgatactttatcatctcgaaccgaacctaggttctacatctcctaatctgacgtccacatcaaactcatatcccaaaatgggcgcgtggaaggagatccggcctcggtttttgccagctgtgattaccatgttcctcctccttcaggtccttttcttagtgaacatgtgctatctttatgcaacgcagttccgcagtaccacccgttatcacaacttcaatgtgctctatgttgactatgacggcggtattatcggaaagtcagtgtcagacgcctacaaccaactccaaggcgacgggttcccaaccctgctgccaagatcttctaacgaatatccccagccagaggatattcgcgaagccgtatgccgcggtaagtactgggcggctatttacactacctcggatggatcagctagtctggaatcagcgctggcaaacgggtcaaacccgccgacctcactcacctacatctggaacggggttcgatacccagtgttctcgcaggcggcagtctacaccaacatcctgaaactaattgcaaccacccggtcaacatactatgccaacgctggatcttcaatagtcacatccgccgacttctctaacgaagccaccctcaaagccttcctcgaccccatccacgctgcagaaatcaacatcaaaggcacgcagcaaggcacaagaatcttctacaacacagtctccatggtgattccaatcgtccaacagttcttcttcatcttagcgctgaacgggatctcaacccatctcgatgcattcataaacctatcctggaaaacaaacgccctgatccgcgcgatagcctctaccatctacgccctcacaggctcactgttaatggccgggtatatctgggcgttccgggagtcgtggggacagcaaggaagtcggttcgtgctgacctgggtcataatgtggctcttaatgcacatcaacttcctattcttcgatatcgcgactgcgtttatcccgattcagttcatgccgtttgttgttctgacgtgggctattctcaatgtcgctagcactatcagcccatttgagctgagtcctggattctttcgatggggatatgcgcttccgtcttatgaggcgtaccaggttctgctccagatttggtcggatgggtgcgataatcggctatatcgggcgcttccgattatgttctcttggtggattgttggtgttcctgttgcggtttatgcgatgcggtaccggtgtaggactgctgtggcggcacgggaagtcttggatcgggcgggactggaatgtcagtcggaaggtaaacatgcagtcacgaatgagacggtgctgccgatcagtagctcgggccgcgaatttgagcaccgtgcggactcgattgagcctgttgttcctcttcttcatatcgcttaaatagggagctatcctaatgaaagtggctattgatggtcatcagaatttggaaaacttgaaattgacagaaaagaggaagggtggaagatgacttggttagcgacggtttgaccacctttggaggccacgacccatatttcgaagtacactaattgaccgagattctcccgtaaactctacttacggtgggtaccgtggcatggaacagttggaaacttttgccttccttttgcatagtagattctctgagtcggaggacgattgaatagactatctagcagaagattatgtggtctatgctacccaataagacgtctagtagtaaggactataatttgatcaaataatccggttacgtacttgaacatttgggtttcaaggtccaatagaataatgtaagccctatgtcctagttatatagtaatgtgaataaaagcaaaaatggacatggactatactcagctctcacaaaagtacagctaggaagactatcacacgtttttctgcactcactagtctatttatttatcgagatcactcctggtttgattcaaaccagtcattattgcgaggttgccatgtctggcaatgccaagctttgtggctgccaccgattacatcactacttctccagacctcgggaccccagactaccgcgtggctgtttccccggaatcttcttccttcccacaaaaaacaagaatcgcgggggcccaaacgcggagattttgccaccgaaagtcggggacgtggagtctagggttgacatgccgaccaacagcaacgacgaaccacccgcacaccccgtagccgacccgggagaccttccaaatccggatgatattccccggactatgtctttcttgcggagataagcgacaccgcgaagggcgcgtgctccgggtttcgggtcaacgtgtcatcggtgcgaggcgtccttcccgactcggtaaccatgagtcctcagaacccggcttccgtcactgtgcatgttgcctagccttggctttcttggtcaggcacggttccctataagaaggccaatccggtccggctttgatttcgaaaattcgaaaatcagttgcgaatagcagatactacgggttaagagtactcgctggcgctatgttcgataaaatcctcaaaaagcgtccgcaggacctctatgcagactcccacgtccctgcaaatgaacaggagaatggtcccggtgatgtcgtcgacacgcctattccgctcctcacgtggcggtcgttcattatgggcattctcgtctctatgggcggtttccttttcggttacgacactggtcagatctctggcttcctggagatgaaggacttccttgagcgctatggtgaaattcaatcggatgggacttatcatttcactaatgtccgctcgggtctcattgttgccttggtaagtagttggctctttatcatttattgctcatatgctaacacatccaacctacagctgtcggttggtaccctgattggagctttagtcgcagcaccgatcgccgaccgcttcgggcgaaagtggtgtattagttggtggtctctgatggtgtgtgtcggagtcacgatccagatatcctcgccttctggcaaatggtaccaggttgccatgggccgttgggtcgccggactcggagttggggcagtttctctactcgtacctatgtaccaagccgagtcaggaccgaggcacattcgaggatcattgattaggtatgtcggaagccagccctatggtcattctgtatcgctttctaactcttctcagtacataccagctattcattacacttggaatcttcgttgccaactgtgtcaatttcggaactgaagctcaacccggccccagttcatggcgtatccctatgggtatcacatatatttgggctgcaattcttggtgttggtatggtgttcttccctgaaagtccacgttacgactaccgccatggcaaggtggagaaagctatgaacaccctttccaaagtctatggtatcccttgcaaccaccgcgctctacatatcgagtttgatgagatcagacaaaaacacgaggaagaaaagctcaacgggaaggtaacctggattcagacgttcagtgctccgacgatggcgtaccggatcgctgttggtgtcgctctgcaagctctccagcaactgacgggtgctaattacttcttctattatgtgagttgaatctggtataatacagaggaaatgcaaccaactaacacctactagggaacaacaatcttcaagggcgctgggatccagaacagttatgtcacgcagctgattctaggcgccgtcaactttggatcaacgttcctcggcctctacctaatcgaaaactggggccgacgccgttctcttataaccggtgcgctatggatgttcgtctgcttcatggtcttcgcctcggtgggccatttctctctggaccaagagttcccagagagaacaaaaaccgccggcgtagttatggtagtctttgcctgtcttttcattcttggctttgccagtacctggggtcccatggtatggacgatcgtcgccgagctgtttccttcgcaataccgcgcgcaaggcatgtctctggcgactgcatccaactggctctggaacttcctccttgccttcttcacaccctttattaccggcgctattgacttccgcttcgggtatgtcttcgctggatgtctctttttcgcagcggctctggtttactttgccgttatggagggacaaggccgtactctggaggagatcgatactatgtaccggatgaaagtgaagccgtggaagagctcgaagttccggttccctgctaatccagaccttatccgggcctcattggacaaaaatgagaatgctcctatatcatctcatattgatcttcctactgagattcgagaagatgggtcggcgccggagaggcaagcgcaagcatgagcgcggttgtgcatgtaccaatagtcttgcttgtttttctttcataacatcattttttatttaattggtcggcatatagcttgcaccaatttatattttcaaatatgtcgcattcctaatgtcccgtaggatattctctagagaactggatcaacctcgtctgtagacttcttcacaagaatcccatccaagtaccgggtcagttcgtccacatcgctaagttcacccacccatccgatatattgatccgggcgaacgaccaccagcgccccaagaacccggtcaactccccacttctcatatgctgttccatcgcaatatcgatcaaacatgcatgcatcatcacaccaaatcttgtcatatgcccacccttccactggatcaaatggacgcagaatctctgggaaatcaaagagttctacctctttccacggcgaagcatggatggtaaagacatcaacaggactcttgaatcgaccaggaatctccatgtagcggttgaaaggcaaactgcttgatccagactgtccagccaaaccctgagtcaaagtctcaatgcgttgcttctgcgttgggtttcgaatatctccagccaaaactagaatgcgaaagcgcccatcactttccaacgctcttgttgtccatattgtaccaccaccagcctgattgcgaagctttgccggccggaccctctccccaggaatcatatgccgcgcaaaaggaaatgtagcattatcttcactcttccaaacaagactgctcgcagggtaaaacaccttccatccatcggcaaagtcctcaaacttccccgcaataagagccatatccgacgccttcgtatccgctccaggtttctgatcagtaaatataggcgaccaatggcgatcgaagtcaagcaacatttccgcaagcggatgtctctccaaagcatatgtcccaagaaccttcggcttgagagtacccgccacagcaagagcaaccttccacccaacattaaacccatcctgcatactcatattcatcccaagccccatcttgggtgagtgcgtgtgcaccgcatcaccggcaaggaagatccggttgtcttttgtggattgggtggcgatccgctgtccgacttggtagacagtccaccaactgcattccttgaagttgaaggtgaagggggcgaagatggcttgcacacgttctcggatgagatccgatgtgattttcgagcggtcaaagcggtcggttgcgcccgcttcgcaggtttgcacggggacgtagaagcggactaggccgcgctcgcgtgggatcacgaggatcgtgcctgcggcgttggttacgacgcttagacggcggacgtccgctgtggaaatgttagtgggaagggggtgcacactgcgggtattacttacggaagtcgctgacgggttttacgtctatcacgcccctgtatatgcgttatattagctgctgtagcatgggtgggtaatgtctaccactaaccatatatggtccgtgttcgacccttccacggggatgtttagctgttttctggtccagctatgggctccatcacatccgattagatactttgctctgattgtctcgacctgtgtcttctgtggctttttacgcggggctagatcggcccagtcatcaggaagcaggttactgcggttcacctcgatgccagccacttcggtttcctgtccgcacgacgaattcgaatcatcttcgccaagaactcggaccttgacagtgataggatatgcgtcgggatcattgctcagtttctcgtcgtattccaaagagtcggcgatcacgctccgttccacatcaagatcagagtgctcccgaatactatcgagaaggaaccgctcaatgcgtccctggttcaagcatgtattgtggaagggagactcatcgaccctaaatatgtcaatctgagcttgtcggacaagctttccctccggtccgggaacctatttgttggtatcgtcaggcaagcctctaatattggaaaacaaggtgatacacacccaaatgttcgcctcggtggagatagatccctcttgcataacacgatgctggaaacccatactgtcaaacaactccagcgtgcgcgaacgaagcccgtctgcgtggccttgaaagactttcgtggcacgattgtcgataatgcgtgcgttgactccgtagcgagccatccagtaagccgccataaggccggatggcccagcaccgatgatgagtctgcgataaatattagactatgttaaataaaggttgggggaacttacacatcggtttgggactgagtagactcttgttctttgtccatcgcgacaggatatatatttctgagcagatgctaaatgatgacccgtagatagagacaagaacgattgtccattcaattcaactatcctttatataaaggaatgtgggcttgctgcgctacatgatcctaaacgagagggccagccccatgtaaagctgactcaagtcacagacaatcctaggattacagaacccaaaatcgatcctaattcaagggtcttccgtgttaatttattcaatagttctcttgtaggctccatatacgacgagatttataccgagcccggatcaatatgccatccatattagtcaggtgccctggtttcctgttgtgacgtggagttccagcagctgagatgagttggcggatttttaatgtgcccatgtagcgcgagctgacctaactgcgatgttgctcaacatgggcttggatgattggctttgagccgggggatttccccgaacgttcccctcacacctcgtcggagttgaggttccgggggtggcgattgcatcgggaggccgtaaactccttgaatgcttattcatggtattgatcaaggaggcaacatgaatgattcgacgcaagcattaccttcagaatttgatattggactggagtttctcatcttttaatcctgggtgacagtgacttcctggggaagcacaacaagggtctgggttgggtgtgtactcagatgggaggttggctgaagacaggctgataccaggcaggcgagcccgacgtacatgctaaacagatatctcgtattttgacagaaaccacaatgcctaggatgtgatcacgtagatgtacagttcagatatacttcgcacgtgactggatgatgtctcccgcgctaactcttcttccggcacaccgagacgttcacgggtgaattcccccgtctcagcgacgacatactgtgggggtcgcgttataaattcccatggattgccattccacttatattcgcagatttatcttgtcattggtgtcacaatgtttcttcggactggcctaattaggaaatccgatgcacggccacgttgacaagtgtcaaggagctgtcaaggagccttcgaggcaggccatcaaagctttttttttcagtcgaccagctgatcatcggcacggttattgaggagtcatagatagaaattcggctaatttccctccgtgaacaggccggttgcgagtcggagcagggtcctccggacggctcccggtgtatactagaaggaggtgtggatggaggagtgtcggaaatgcgggccattgaggtgcagacggaataaacggctattgatgcgtttcgagacaagtgcagaagtggtcgagtgcatgttcatatacaatgtcgttgcttcatacatattcatgccctcgttgatgactcatcccatagggtcgagaggtatagcagctaagcagatacctatacaagtctagagagggcaattggattgatttagcatttcgaacgagacagaaatacccccgtaaatagatttcctccataaattctctgctgaatgcgatctgaactccgtaagctaagttgctgggctgcaggcctccgcctcccccacccgacatcatacccccaccaacaaatacgttcccctccctcttctcttcttctctcattcatctccccaaatcctcccctttactcaaaaatgtacgtactgaactgacttcttgtggttttcctttctaacggtattagaatccgccatcatgggttacactgatctggaccatttggctgtcaacaccatccgtcttctggcggtacgttaatttttcccgggaaaatcgccacgacgttctacgcgctcaatggagctacattggggtcttggacctcatatgaagcttcgatgcgtgcagtctgggaaatctgactaacatttatctcgctattaggttgatgccgttgctaaggccaactccggtcaccccggtgctcctatgggcatggcccccgtggcccacgttctctggaacatgatgaactttaaccccaagaaccccgaatggcctaaccgtgatcgtttcgttctctcgtatgtgctttcctccgtctctgaaagctaggcgggttctttccatgcgaaaaatcaatggccgcgcttttgaataccggctaatctcaaattggataggaacggccacggctgtatgctgcagtatgctctgctccacctgttcggatacaagatctctttggatgacctgaagaacttccgtgtaagtccctccaagccatatacaacagccctgtactcatttcagtagcaactcgacagcatcacccccggtcaccccgaggctcacgacacccccggtattgaggtcaccactggtcctcttggccagggtttcgctaacgctgttggtctcgccatggctcaggctcactccggtggtgtcttcaacaagcccggcttcgagcttttcaacaactacacctacatgttcttcggtgatggttgcgctatggagggtattgccagcgaggctgcctctatggctggtcaccttaagcttggcaacttgattgccatctacgatgacaaccacatctccattggtaagattgactcgagtaccgcaagctagatatgaagggctgacagcttatctctatagatggtgacaccaagtgtgccttcactgaggatgttatgaagcgcttcgaggcctacggctggcacaccgagtgggtcaaggatggtgatcacgacctcgagggtatcgaggctgccatccgcagatgccagcaggttactgacaagccctccgtcatcaagctgaccaccaccattggcttcggctctaagcttgccggtaccggcggtgtccacggcaaccctctcaaggctgaggatgctaagcacgtcaaggcacttttcggattcaaccccgaggagagcttcgttgttccccagcaggtttacgaccagtaccacaagcacgccgcagagggtgctgccaaggagcaggagtggaaccagctcttccagaagtaccaggccgagcacaagaccgagggtgcggacctcgctcgccgtctctccggcaagctgcccgagggctgggagaagaagctccccgtctacaagcctactgatgccgccatcgcttcccgtaagctgtccgaggcctgcctcgaggctatccacgacgtcctccccgagctggtctctggttccgccgatctgactggctccaacaacacccgctggaagaacgccgttgacttccagccccctgaccttggcatcggcgagtgggccggtcgctacgttcgctacggtgtgcgtgagcacgccatggctgccgtcatgaacggtctggctgcctacggtaccatcatccccgccggtggtactttcctgaacttcgtctcatacgctgccggtgccctccgcctctcggctctgtcccgcgtccgtgtcattcacgtcgctacccacgactccatcggtctgggtgaggacggccctactcaccagcctattgagactctggctcacttccgcgccatgcccaactgcatggtctggcgtcccgctgacggcaacgagaccagcgctgcctactactccgccatcacctccaagcacactcctactgtcatggctctgacccgccagaacctgccccagcttgagctctcctctctcgagaacgccctgaagggtggttacgtcgctgtcgacacccccaatgctgccgtcactatcgtgtccactggttccgaggtcagcatcgccattgaggctgccacatacctccaggagaagcacggtgttgctgcccgtgttgtgtccattccttgcttcgaggtcttcgattcccagactaaggagtaccgtctccaggttctgcccgatggcatccccgtgctgtcggtcgaggcctgctgcaccatgggttgggagcgctactcacacgagcagttcggtctgaaccgcttcggtgcttccggtccctacaaggaggtttacgctgtaagttatatccgctcatttgtccatgatcatttactaattatttgcagaaattcgagttcacccccgagggcatcagcaagcgcgctcttgccaccatcgacttctacaagggcgtccccgtgcgctcgcctattaaccgtgctttccagcagatcctgtaagggacggaacgaatatgacgtaacaaaatgttttggtttttttaatagggcaactgccatctagatatacgagaatgcgaataaagcactctattgttcacttatcaatctagtaaccttaacagagtaatcagatgcgtatatttatatctagcagactaaatcacaactcttcccagttcttcttttgcagctccagaacatccctcagcatctcttctttcttcgtcctcttcgcaagagtataagtcccataagcatcttcagtctgcttaacaaccaactccttccacggctgctcgccctcaatatcaatctggcccaggtcaccccacacatcctgaatcgtcggcgcaagcttctggaaaaacgccccaattccaccctctccaccaccagcatgataactctcaaacacaccacttccagcccaccgtgggcccaaactagccttaacaagaatatccaaatcctccgccgagacaaccccctccccaacaagataacacgcctccctcagcaacgcaaaagcaagtctattcccgacaaacccaggcatctccttgttcagcgtgacaggtcggtaatgctgcttagccgatggatctgcactcgagccagcagcaccaacagcagccccaggcccaggaacctcgctgaaatacttcttcacaaactccacctcctcagccttcgtctcaggcccaggcacgacttcaataagcggcatcagatgcggcgggttgaacgggtgcgcgatgaccaaccgctcagcaacaccctcgcacccggctgcctgcgccgacgcggggatcccagatgaactgctccacaggtgtgcatgcgggctagagagactggcgacttccttccagagcgcctgtttcgaagctgtcttttccgggctctgttcctgcacgattgtcgcgttttcgagcgcgacactcaggctggtggctagtttcaggcgcgatgtgcggatcagttcgtcgattatggtggttgattccgggcagtccaggagggaggggagcgtgcttcggatctgggactcgtagtcggggcgtgggtcgtagactgttatgctggtgtcggggcggcgcaggtgcattgctagcattgagaggccgattgtgcctaggcccaagagggcgattcggtgggggtattctgtggccatggttttcggatttcggaggtttcggtttcttgaaggtgtttggaatgggaggagaggaagagggaccttatagatagctacatgtagtttcggggaggtccgccgataagtggggactggaggggctatgcggcgccgccatgcggcggcggctggcggacctcgggaggggattgtctgtcgtgcccaggctctcnnnnnnnnnnnnnnnnnnnnnnnnnnnnnnnnnnnnnnnnnnnnnnnnnnnnnnnnnnnnnnnnnnnnnnnnnnnnnnnccccggaggggggggggggggggcggacctcgggaggggattgtctgtcgtgcctaggctctcatgagactccaacgcgatatgatgagggacatgtcattgaatcaagacgaattggcgtctcgttagaaccggtaagatcaatgtatgaaaccagtcggatattacgcgtatataccttatgtttctggagattctactatttttgatgctgtgtggaaaactgactctacgagtaggttttggcattccttgaagtcacccgacttccattttggggtcaagtccagattgaataatcacaggtcatgaaaatccaactcacatgccacagcacatagaacaatagagcccacagaagaatgggggtggtatactgtttggatgcagagcagcccgaaaaacgctgacccaggataattatattgtctccgtcttatgctcggacggggcgctattttccaagtccgcaaatgcaagccccgtgacttgatcgagttccataagctcatccgcgacgggtaaagattgcccaaaaatattatcccattcaccccagtcgaaattgagccctggatcgatcattaagggggcgggctcagaagcaggcattgcgttcggtccggcggtgtccaagaagttcaccataggagagttaacgagggattgttgactcgacatagtagcggcggaggaacgaccaaaggctgagtcgggagcaaatgctctgtcgcctgaggatagggggatatttgcggatgacattgatttgaagtaaggtgcatttgcgaaattggttgaccgatcttgccccgtccagggcaattctgggttcagaccggctttctgccaggcctgttggcgcagacgacggatcatgccccaggcctcgcggcctccattcctcaacgggcgttgtgtgaagatgtcatctccgccactcacgacacctccgtccggtccacaaagagacagaatttgatcaacaaatccgcgtgacacggaggcttcggggctatatggtcgttcatacaagtcgatgagaatgatcctagatctagttagcttggccacttaagtcgagctttcgacatacatcattgcatgcatgggctgatggttccttggtgatcattagtcaaattcttatttgaacaatcggaatgctcacccaggccagccccattgaaacggctgaaagtcagggtccgtcgccaatcgaataaacttctccatgaatgcatagcaatggcgtagcgcactatttggattagatccagtagcccaatgagtcgcgacacttacctttgtcgtgctactggccagattcgacttcgagggttcctgaggaatggttgatacgcaacacaaaatgcctacatccatgttagcgccgcacgggattttggcattaaaataccgaccttatcaatgaacaatgacagaatgatcttggtccatttatgaaatgcgacgaggactgctgaatgatattgctccgggcagccagatggaccttcaataggaagttccgcctcggtagaatgagaaactcgttttggagacactactgttctttccgttgccgttgtctctggaattcggtttatgatggagttgagtttgacttgaagatcgtgaaggacagagcggagctccagcatatcccctcttgttagaggcttcgtacccagctgaatctttagtactttacgaacagactctgcgaggaggtcagctcacgcgcctaacatttagacccaagatcactcacgggccattatgcattttgcctttgcgttcagataatacacatttaccatcgacggcccaccacagacagtcggattgtctgggttatcaggtggccgttggccgtcggcaacctgttgttcatatcttttggcttcggcagtacctaataaggtatccttgacctcgctggtctcacgaacgtcccagtaagtcgtatcagtaagcaatggcggaagcccactcgacatcgcaataacggcatccatatgcatgatatgccaccacactcggcgtcggaactctgcctcccatgggtcgatattaaaatgggcgggatcccgatgtaatcccaaggtctgtgccactctcactgctaagctaacaaacaaactacttgccaaaggttcttcctctcttgacaaaattgtctgcgcaacaagataggccgccagaccatgaagtgtgacgctgtggggaaacgaaatcttggccaaccaacaggtgacctcctcgctatactttgtcgagaggacagcgcgtgacgaagtattgaactccgtttccatcgttctcatagaaattgtgactgagcctccaaaccatatcgcgtataggagtggaataaaagaagaactagggcatggctcacccgtatagcttttgccgtcgtaccagtcccaaaaggctttataacgtcttaggatcgttggagggtgaacaatagggctcagtgagtggacaccagacatgaaacccttgtagagaatatcactctgccattttgttggaacatgctcaagcatatatggctcgaccgatttatcatttggtgataaataggccgatgggatgcaaacggctttctgaaggggttctgagaagccgacaggaaagggggagcgcgtggttcggctcgtagttcggctgctcatcgattctttccgctgtctttgcttgctagaaacggaatcggttggggtgtcactacaggttgctatatcatgcggctgattctggtttccgagcaattgattgagctcctccatttcatgggaaatataagcccaatacgttgtcccgacatatctaaacccaaggttagaaactcaatcgcactttagcctagtgtgtcgatactgaccttgacctcccgccatcccccaaagacatgtggcccaagtttgaagttcccagtggatcaaccagatccgtagtctggccatttggaatggggaagtcatcgctgctacagtcagcagcagcgctgaatggactgggcggttgcgcgacgatcgatttgctccccaaactgccgtcctccatcggcgccgtttggacgccagtatttaatgcagccgcttgcatctctgtcgattcgttcgcctggttatccttccgtagtcgctcaacgagcgatacgagttgagccagatgggcttcaactgcgcttaaatctgttttttggccttttgataatgatccctgcctcgctcggtcatagatcggcaggggttcatctgtattttcctccgactgtgggatatctctctgccgtttggctctcactcggcgagtacgtttggctcgcatcccatctttctggatctccgggtcgtaggcgcattcggtaccatttttcgcgcagtttccgcatactgggagtgtctaacaagaaaatttcagttcaggcaacttggtcctaggccagaaaaggttaccttgtcgcatttgactttgcgccgacgacatgtttgacagctataaatcacacgttttcgggtaatgtgtggatttcctggcgccgagggcgaccttggcggttcagtggtgctagacgggttggagggccccaccacaggctgcatattcggcgtgcttcgacaatttatccgtctcttttcattgattccgtccagtgaccaagtagaaggaacatggaaataatcaaagagttacgtgtgggacaatccaacccgcagatgtcggggataattgcgttggtactccgcagtgggaacgatcttggcactctgacgtcgggcccaggttaccaggtggattactcagcacggtctggacgaatcaacctcccacctggaaacacgcatcgattatttgacctaatatgccaattcgttctaaggtcaagaagatctatagggcaagagagtaggttattgcttatgtttgaggatgtccagaagcaaaaaagtcgctcacttcaatacacgacacttgccgatgggcttcatggtcgtaccaatcgatgatacaccaattgtcatgagaaggcacttctgaagaatcgcttctggaattaattgtaatatactgacgtggagtagcacataggctagtagctgtccgagaaatggccaatgttctactcagcaagcgtggttcaatcggctaggcctaatccaatggcctctcattcaatttcaagattggaattttctaattcactaactactcaggcacagtcccgcattccatgaaccatgaacttggcgtgtttgttgtagtttgtcttcccaattccagcaaagccccagaggcaccaaaactggcgacgggaagatgttgtttagccgaagagcaagtccaatgggtggtcttttgtccccagtgtccccagttccgtctactgggcttttcatttattgccagagaaggtgataccaggccaaaattgcggttggtcgagtatggtatggcgttcgggatattggtatagtttgtaggaatagatgtcacctcacatttttgcgccagggcattgtaaaatgtacatttcgcagccgacattggcgataataggtcacgaatatctcccacctatgctttcaaacgaggtacatgtacggagtaggttgtttaagagatagaaaggctgttactgccgttcctgagggcaccttccccactaacccccaccaacccccactgcccggacaatggccgtgctttcgtaacttggaaggaacgatgagacaagtctgagatctattctaatgtgttctcggccgagtgagtcattgttcttgggctagcttctgctccttttgtggacctaagagctaagaagaccgtcgcgacaatgtacaacatacaacaacagggcagggccttgagtctaagcccagttataaggattccacattttacaaagtacatgatatattgtagtcggagtaattgttactgccaatccccatcggaaccatgtcaaatccgttatagcttcatcgtagatctcttgctagcacccaatcagagccagggatggtagatgagatctgggacataatctcacctcatctcaactgcgagcttactctagatctaacaacgggtctaccccactctcggttcagcctcaaagcttatttgtgatcatctccaagtccgagccactgcgtatgttgtatccttatattgtggttgtttttcagctcccctttctcggatgatgacgaaagaagatcgtgattatttatcgtacgacactcgcatgtcacatccgctttcctgtttggctagagcgtggttctcggccggatgcttgttgacagaatggtgccttctcggccgagagaatggcagcagccttctcagtcagctatgtacataactagtcactctgtgagcgcacaaatagttcggcccccgcattctacgaacccgacccgcaacggtataccgagagagttatgatgggtcttcaacaccgaagacttgtatcatgatgaaatttatggagcccagatcgaaaagttcttatcaatcaacttgcaattgtaagtgcatagggctagcatggtgtattttgtgttgacttatccgatcgtcgtggcgttcggtgagtgcccagtgtacaaacctttcgggtttagactccatacaagcttctcattattcttctagtagctagcttctttttcgccacaatgatgacaagcgttgggggccctgcctgcttattcagaacctgcagcctatgtacccgtacgccttccttcacagcccaggataaactagtagaaagtgaaaatatctagggttaacatattcatcgtagttatgcaagtataagaaagaagctagagtatctatgtttctctccggatcgtggcggaccaaagttgttgactatgaaaaggctattcaacgagatgacgtcgtgatgaatctcggccgaacatacatgacaataaagaccgaacctgcttgtagctacactacgaacccaccaattataatcaatttcgaagagctccattaatatctcaagctttgcagttccgcaagtataaaagcagcttctattccccgattcccgccatattcatctacaatccacggtccattcacaccacgtctactcaacttttctgttatttacatcatcaatcatgtcacctcagcaggacagcagactggagagcaagtccattgctcaacctttggccccatttacatacgaaaaccaggtgtaccaagccggtctctcgggccagaagcccccgataaccttcaactgcggcgattgggaagccctggccaaagatcgtctctcggcagattccttcggatatgtttggggttccgccggaactcgtgagacagacgacaacaacaagaaagcttttaagaaatggggaatcgtgccgtcacgcctagtcaagagcggcttcccagaccttaaaacaacacttttcggagagacttttgactatccgatcgccatggcaccggtgggcgtgcagcgaattttccacccggacggagagattgcgtcggcgaaggctgccgagcaggaaaatgtcacctacatcctcagcaccgcatccgctacaagcatcgaggacgttgccaaggctaatggaaacggatctcgttggtatcaactctattggcctctgagtgagaacaacgatatcaccgtgagcctgttgtcacgggcgaaggcgtcgggttataaggtgctggtagtcaccttggatacgtacattcttggatggcgccccagcgatctgaacaatgcatacaaccctttcattcgtgcagacgacattggtgtggcactcggattctcggaccctgtataccgccgcaagttccaagagaagcacggaaaacccattgaagaggacgtccaaacagcagccgcagaatgggcacacaccgtattccctggtctaagtcacggctgggaagatctcaaattcctccaggaacactgggacggtccaattgttctgaagggaatccagacggtggcggacgcgaagaaggctgtcgagtatggcatgcagggaattgttgtctcgaaccacggcggacgccaacaggatggaggtattgcgtctttagatgttttgccagagattgtcgacgccgtcggcaatgatttggaaataatctatgactcaggtgttcggtctggtgccgatatcataaaggcattggcgcttggtgcaaagatggtcttaattggtcgtccctacatttatgggttggccattcagggtgagcagggagtacgccatgtgctaaagagtctcctaggagatttcaatttgaccctccacctgtcggggatcagttccgtgtctcccaagcatctgaaccgatcggtactgcgtcggacgggcaactgaagatttgacaattagatgataagacgatcactccggttatacagtttcagtttgaatatatagaatatgttctttgtattaatatcaagtactatagatctattcaaagggcatgaagacaactgatctgtgcagattcaagagtattctaatacaccatatctcctttcaaaaaggtggagaccttataaatatacagcagagtctatattcattttttcggaggtagcctacgctcatagccagtagtacgttggcgtgccttttgttgcaatggttgagtgtatccggagaagagtccatgatgtaacaatctcaaagattttggcaatatatatcggcggacaccaaccttccattactaggtactgcaaccacgagggcagcctttatcgaaaacctcctttctgttagaagtgaggtgctcggaatatgtatgcctaactcgtcatttgacccattgacgggaagatctagatcgtggggtggaaatataagaaagtggtttctactcccatctagtcggagtatttttccatgtcctcacatagttcctccagatcaacttgatatcatgaggatagttgaccgacgatgtttgtcaggaaatagggcaggaacttgccactaacgtctctccgctagcatagtaagaatgacgaaattttgtaaggttccttccaattttagcaagtaactaggtaactggcgtcagaggcctcaagaataaggccagaaatcggtattgagcctcataaggactctgacataggtgctgtctaacataagcttacgcttctagtctgtgaagtcttgctaatattctcaatttagattcgctcctttgaaatttatccatctatctaccgctccaaattttgtaaagtaacatcaagactcaatgagtagccttcgatatccaacttttaatcactgcagaacagatcctcggcagccctatcacccgtagtaatacaagaccaagagtaatcattgctatcagtcacaacgccagcaccgacattatattgagcacaggtcgtgttgccagcatactggttcagccaatcaacaatatcatcgcccaagttgatgtcttgacccgcgttagacgacaccctgcaagacatagcagcactcggctgagatagggcggacaggtcgaccgacgatgttgtgttgtaattctcccgaggcaggttatcgagaatacgacgcacagcactgccaggatggtcacagacttggatatgaatctgctcctcggagcgggtggcgacactgttgatcgcaagtgttcctgtgtccctgatacctctggtgttgagtgtatcctgaccaaggcggaagcccccgtccacgtcagcagcggagctcaattgaagaatgccggggatcaagtccgtcgtggtgatcaagtctccactgctgaggaccacccacgaagctgactggttggtccgaggcgggccaacaggaattggagggctggcgatgcaagtcgtctggtttccggattggaagtcttgaaggcaatggcacagactggagaaccagatgaagcagccgttgcactcggaattggcgtcgacacagcccgcgtcacattgtgagagctgtgctcgcggtatcacgggtgacggcgggggtggagggttgcaggtgatagggcattgtcccgacggtgtaacgcataccaggtcattgggtgatgctgggaaagtcgaagggcatgtacagcccctcacgtcccttctggcaatgtcatcggacgtacacaggcgtccattctgcgtaccattcgtgggatttatgccattcgtggcattgataaatctctgcccgaagaccggagtcgccaggaagagagaaagggtcaatgcaatgcaatgctcatagatcttcattgtgatagatcagaggtcaattaagagcaaaataattgaactaaatctgcttttccagtacagaggcgacttgttgctgaatatttatagcaagaatcaacagaagccatgatgtaaacctgccgtataggtgtgtcagccctatcaacctcacctttaatgcaatcggctctcgtttccgtggagattccaaggttatcgatcttgacgtccaatgaaaacatgtctcacaagaagtacattggatcatcgccgcatatcattgccgtcgtactgttcagtgttcaaaggtccgggggaaccagagattgactcggattcattaaccgccgtctggtgcttgtttcaagagatttatcaagcaagtcattagttagcatgggtgacctaatgaatcaggccgcaaccctaccccggcgttttgcccccaacattccaaattctggggttcttagaatcggattttgcacaatgaaatccataagcaaacacttagagagcataatgcaggactacacggagacaaacagagaatagagtatacgaaaatccatgatttcatttcaatatcgtcatgaggatataaagaccataaaagctttttcaaaaatcgcgagatttagttaccgagcttctggcgggcgaagttgggcagaacaaagctggcgcggtggatgtcctggttgtagtagcggcagagcttcagctcctcctcagcggtccaggtgcgcaggggctcgcgcacgttgcgggtggcgtccttggagcagaccatgaagccaatctggccggaggggtaggtgggaatggtggtgtaggcgtactcggcgacggggaagacctccttgcaggacttcttaagttcggcgatcatgtcaaggtggagccattggttctcggctgttagatataaagcacagctccgcaaaaccgagcccgtaaagcgggttggttgcggggtggtgcgaaagaaatcagcatgtggtcaatttttttttgtgtgataataagatgaagggaatgagcaatcaaggaaggaattgggcaagaaaataagaaagtgacgaacaaccttgggtagtgatgacacctccgtcgcgaagggcagacttcagtagctcaaagtagggcttctggaagaggctctcagcgggaccctctgggtcggagctgtcagtgatgataacatcgaactcgttctggcggttcttgaggaactcgaagccgtcaccaacgtgggtgtgggcattggggtgctggaagccaatggccatgccgggaaggtacttcttggaaacacggatgacagcctcgtcgatgtcgcacagggtggcctccttgacagaggcgtgcttgacgacctcacggaggacaccgccgtcacctccaccaatgaccaggaccttctcggggttagggtgggagttcatggcgaggtgggtgatcatctcctggtaggagaactcatcgcgctcagtgcactggataacgttgtccaggacgagaacggtaccgtagtcgctgctctcgaagacgaggacatcctggtacttagacttctcgtggtggatgatttggttaaccttgaggctcatggcctggccaggccacatgccggacttctcagagaaccagccatctgtagatgggcgtcagcatgttcttgcagcaaattgactagtaggcggggtaatggaggggcttcacacgtaccctgaatggtggggtgggtgagctcgctcattttgatagagaaagaagagaaacaacggagaaatttagatgatgagtagaaagcagaagagagtctggggagacgaagcattcgaagaaaaagggcacggcggaagttttgctgttttgggcgaattttttgcttcttctcggcttaagtggggaaccgctgctgtgctgccaccaaaacccaatatccgtagaaacaggatgaaacccatcttaatgaagataataggtatgggttgcctctagtaacccttaattgactgcaattcgacccggtacacatgccccatacccataattgggtatggacacctcagggaccaatagagagcccgagaaagacgcttactcaggcttgcctttgaatataagaaaatagagccctttcaagcgcaaaaatatggtaggtaaaaggaaaatcaaacggtcgattgctttctagttactgtacaagcatacagctcccccaaagtgcagagtcttgggtgttcatgctctgttataccaatccaacctcactccacgaaacaaaattgaaataatttactcttcattgtcaccctcgagaagacggccgggcttggagttcaggaactcgttgctaaagcaccaaattagcgcacagtcgaagcggctcctaagggcattcttaccgctcaatggcccagttcatggcgacgtatgcgataatgaaggggggagcaacgtaaagaacctggtggcggaaacgacggaagacgttgaagatagcagcgtgggcggcaccggccatgggacgctgacggttaggggacagcgagtaggtggcgatgcgctggggagtcgggcaacctgtaacatggatattagcgatccgctcgaattgcaatctcctttatttctctgaatatgtctagatcgatccgatcttcatatcgcataaggggtcggcctcctgcgtatgcatccggtccatagaggttcaagggttattgtcgaacgtaccgaactctccccagttgccgatgtagctataagaagtaaaaattgtcagttaactgaatgagagacgcagaatacgcagagactgttaaagcccgacccaattggcatctttaggaatttgaattgtgtagccgggcggccaacgcatccgggaggccggtactcaatccacgacgccaggagcatgggcaaaacgacttactggccgttcttgggatctacggagtgacccattttgaaagattccgagtaaaaagagaggagtgggtggaaaaggtatggaggtagcgaaatgagtgaggaaaagacgaaggtcgggcgaagttggaggtttggaaagatgggcactaaacccaatcgggaacactcagagtgagcgtcgggaaaagcagacatcatctccatcatccgtcttcatcaactcgacttccacctccaaccatggctcaagtcctccaaaatgtttatcggctggctgtccccgtggctatcggtggtatgctagttcaaaattccctttacgatgtcaaaggcggcacacgagctgtcatcttcgatcgagtgtctggtgtgcaagagaaggttgtcaacgaaggaacacatttcttgatcccatggttgcaacgcgcaattgtttacgatgtccgcaccaagcctcgcaacatctctaccacgacaggaagtaaggatttgcagatggttagcttgacgctgcgtgtgttgcaccgcccggaggtgccgaagctgccgcagatctaccaggtgtgtatctcatatgatctctcaacagatacctaagggaaagactgacccagagttatccagtcatacggtaccgattacgatgagcgtgtcctcccgtccatcggaaacgaagtcctcaaggccatcgtggcccagttcgacgccgccgagctgatcacacagcgtgaagctgtttccaaccgtatccgcactgacttgatgaagcgtgctggacaattcaacatcgccctcgaggacgtctccattacacacatgaccttcggaaaggagttcacacgggctgtcgagcagaagcagatcgcccagcaggatgccgagcgggcccgattcattgtcgagcgtgccgagcaggagcgccaggccaacgtcattcgcgctgagggtgaagccctgagtgctgaaattatcagcaaggccgtcgctaaggctggcagcggactgattgagatccgtcgtatcgaggccagcagggagatcgcccagactctgtcctcgaaccccaacgttacttacctgcccggtggagaaggaaaggatggaaacaagagcactagcctcttgctcggtctgcggagttaggaggttataaggctgtttcggggatttatgggccccgttttcacaactcatcgaatgtaccaattaatcgcaatttttgccgcgacttggggccagtcttgcctcgtgccgtgaatttggagtggtctgaactataccaccttcctatctgtagcaataccatacctcactccacaccacttctcttttagaaaaaacattctgaaaactcaatcgtattgctcattaaatggttaaatggtgatttatatcgtgatatagaaaacatcagatctacaaacgtcgatacacgtgcatttggaagcgcatgtcttccaagcctgctccttcgccaacttcataccgcagacgcactgcgtcccgtctccaccacctcgagtcctgagtgtatacgcactcccacttgcccttcgccacagacagcagcgtgtggtcaagcaagaacttcatcggatagttcctctcttgtggttcaccgtccggtccttttcctaacttcaaagttgaatagctgccaggactatcaacaaccaaaagcaccgcaccagcaggaaggatttccgtcattttgagcaaaaaaccggtagtctttggcatggaggtagaaaagagctcattcaaagtgaacatgataggaacgaggacggaagtgaaaggagaagacgaggaagggccgaggagaatttctttgaggtcctcctcgggaagagtcaggacatctccgcggcggaaagacacggagaatgtttcactggccactttctctaagagcaaggggggacgatattttgttgtctgcgaaaatggcacatcggacgaagtgatggttcgtgaaagcctgtcaacaacgtctgcccagtttccgatatcgacagccatgacagagagactgggtgcgctgactccttgatctccttcttctgtcttcttctcatcttgagattccatatctttgttttcaagagacacgctggcaataccttcctctagcgactgggcttgggaccccatgtctctccacgcagctgcaagagcagcgatctctgcaccggctccgccaccaatcgacacaacacgggtgcagggattcttgcttctagcacggcctcgcgtgttttcctcctcctctttcatccaagtcaaaactcccttcaacaggcctgcatatcccagtgaccgggacgcactccagcgcagggcatatgcgcgcagtagatcctcgcctgcctcggtgaaggcagagtcgaaatcgcgctgatatagaagtcccttgattgtctggatgagagatttaatatctaatggttcatctttattttcgtctgattgcgattcagtgaggttggtatcctggcttgcaggttccgattctgcaactgggttgcccaggagggctgttttgaatacgtccaagagcagttgctggagggtaagaggaattgtgctaacaaggttaagtccagaggactgttcttcctcttgttgttcggcttcggctttggctttttcgacttcggctttgcgattggcgtgctgtttgttcgctggtggcgcttgtttttgcttttgcgctttcgcttttggacctggagatctcctgcggtttccctgacgtggggcgtgaggcattattatattcgagaagacactcgtttcgtctagtcctttgtaaagaatatgactgtcttcatcgaacgtggggtggaattttgcactttttttccttatcgttatcggcgactccactataaaggtctataaaccccccgatctgtattcgacttgattgttggacttgttcgaaaattttacccttaaactttggcgaaatatgatggctagatgtatactcgcccttgttgcattacatgagcttgtctccatcaagccttgttgaataatgatcactatggaaatccttctagtccagagtaaaagcgccgagcacgtaagcgtcctaaatacaatcaattggacaaaatatgttgatgataaactacaaaaccctggctgagctcctctcgatcaatttgctacagtgatgatatagaatccctatcatacgacgttgacgctgtatatcgacgcagggttgtcaagacactgcatattctccaaggaaaagccacatgctgacaataaataaactaaaatatacatgactacaaacgtgatcaatatctcaacttggaatttgtgcaccataggaggcttgacagagagagttgtcgccctgccaacatggcccggcgcagctgggcaatactgaattgaaacaccaaacctgacagtttaggggttcaaaacaccccattatgttgcctctcagtaagccttgctgatctgaaaagctatgaagactgactgtgccaactattttcctaaaaataggacactttggtcgctagtacgaaagaaacactcattcccccaggattacgtgtgacatatctgtgtccgagttggtttagctactcatatatagctattacattatacgtcactaagtatatcgaaccgtgcacgtttcatagtcagggtcgggcgtcaagaaggcaataagtaaagatatatgtgcgttgcaccagagaatatatttcgtcggtcattattgccaaccttgcatttcatctccacggagagctcttttgtgataggcaaccaatagaagaaacaagctacacggatacatggcgtgctatatattttgtccttattattaccaaaccaacttctgcctagagcactgcccacatctatgagattccacgagattccaaactctcatccaaagccacatgaagacaggaggagagttttacctgatcaacacgataccaacgtaccaatgccgtccgtcatatgatctcgctcgcgtcgagtcgagagccgaacgcgcgctccacgtaagaatgagtcacagactagtgctgtaagccaaggagtcataactatccgttgcccgagcgtactatcatgcctcatagcctataggccgccgtgggaagcagcgggctccgttgggagcccgtcaacnnnnnnnnnnnnnnnnnnnnnnnnnnnnnnnnnnnnnnnnnnnnnnnnnnnnnnnnnnnnnnnnnnnnnnnnnnnnnnnnnnnnnnnnnnnnnnnnnnnnnnnnnnnnnnnnnnnnnnnnnnnnnnnnnnnnnnnnnnnnnnnnnnnnnnnnnnnnnnnnnnnnnnnnnnnnnnnnnnnnnnnnnnnnnnnnnnnnnnnnnnnnnnnnnnnnnnnnnnnnnnnnnnnnnnnnnnnnnnnnnnnnnnnnnnnnnnnnnnnnnnnnnnnnnnnnnnnnnnnnnnnnnnnnnnnnnnnnnnnnnnnnnnnnnnnnnnnnnnnnnnnnnnnnnnnnnnnnnnnnnnnnnnnnnnnnnnnnnnnnnnnnnnnnnnnnnnnnnnnnnnnnnnnnnnnnnnnnnnnnnnnnnnnnnnnnnnnnnnnnnnnnnnnnnnnnnnnnnnnnnnnnnnnnnnnnnnnnnnnnnnnnnnnnngagcccgtcaacggcggtcttatctcccgactccgacattctagatgtggatgccgccagcggggccgcacggtctcagagacggccgtgctcacgaaggtctcacgagagcttcgtgggtctacgaggcgatgggacacgggttgaaagtggtgtggctgaaatgtctgcctgagaactatcgctatagcgtggaagcctgggtgcctcaggaataaatacttgttcacgcccatgaacatcattggctgccttatacttcggctgtgcatcccgaattcaatgccacgaagatccatcgcgtttcagtgttagcagatggcctcttgaggatacagagtatagataggataatttgaaacatatgaccatatcaagaagatattattcgtacaatttgtcaatcaggaacaaagcgaactaaacgtggagttggttggtagaagcgagtaacgcaaaggatacatcgaaccaaacatccgggtatatgaggcgagataacgctgtaaaccgcctctggagacaacaccgcctggcccatacgaaatcatcaagctaaaacgccgtaaagagggaaggtctccctgaattctcaaatctttgcagaaagcaaagaaagcaacttgtgctcagaggatatccatggagaccgaacccaaatgctacacaaaacaagagggaaagcaaagtaaaaagaaaccaccaaacaaaacgaaaagaaggaaatgtcgcaaattttttgaagcgcatttactgcctcgataaacgcccacaagatgcataggtcaaatccgtagacgtttcaatctgagaaaagcaacccctaaacgggaggggccgcagcagactggggagcgggctgtgaaagatcctggagttcgggcacgggaggagactgctgagggatagcctgctgaatagtggtgacgattcgctccagctcttcaaggcgacgatccttctcttcgatttcccggcgaagtctcttaacttcgttgtgcaaatcgattccggtcacaggcagatcccggagatctccgctgggagaatcgtggcgccgcttcattccagcaataggaagaggtgaggcacccgtggctccctcgacaccttcaagttcaggggggcggtcccaagacatatcgaccatggcaggagcctcgtcattgtgcatgtggcggcggcgaagatgttcgcgcaaattttcttggcgcgtgaatccattaccagtgctgcggttgcaatcagtgtatgggcacatcagggccttcttggtgtcggtgtttttcttgtgaacttcgcgctggtgacgtaggagaccaccagagtaggtgaaaccttggattttgtcacagttaggttcgtaacacttgtagggacgatcatgtttgtccatgtgtttgctacagttctgttagtactgggcgcgttaagaacacaacaatatgacattttacttacttccattcgcatggacgtcggaaagtaggaggcgcagattgacactcaacatgatcgcaaaaaatttgaccttcagcgttcttaggaggatcgcgagcgcgtcgaacagaaaggcgcgggcgcgcgccctcgaggccgtaggtcataggctgctgagggtcgttcattctggcaattgggggtgaggattcaggtttagaggcgaggattgacgcagcgagggcaccgtcaattccttcacttcgtgggctaggatagtcagacccgtcgcccatattttgaagttgataccccacactactgaggggatggtgatagaatgaagtagataccggaaagacgcgtcgtcaatgcacaacaacggtaaatttagaaacacagagtaatggggtcgatggaaacaacaagaatagagttgtttatgaaaaaattcaaataaattggccgtgatagcctagtagatgttgatgggtaaggcttcgggagaagatggaggagttgccaaaattttcaggtagcaaggcatccgcagcctatttataccgcttgcgtcaggtgcatatgcgccacccctgtggcgcagtaatccttattatatcagcaaatttttgcttctttcgtttcctagtggagtttctgggcaactagattgtcatatgaattcataactggctagagtttatatacatgtgggttaagatgtggaaagccgtctattaatgcctggtggtcggatatcgagatgagggggcaaggaagcaagtgactcataccctagagagataccgtgggtatgactgtgtactatgtacggagtacggccaatcctgttgccgtcggcgggcccaatttaggtatcaaagcaagattgcctgtcaggcagctgtccactgtcctctgctcaggtggaacaatatttgatgttgccacagattctgacaaatttagtggcggtgaattcacgtgatacgtagtgattggtccaacccaaatcacgtgcgtatcaaatataaatcgcttatctaagcattggatcgggcagcaccagggcagtgcctttttgcaatgtacgttcgccatgcccgatgttaggctacaacaaactttttatgcttgacaaactttagaattgaatgaactgcacgtccatgtagttgattgttactattaaaaggaatacgataaggtttcatgtagtaggctttgacaacttcaaccaggcgatgcaagctcgcttaagaaggatgtcggacgttctacaggattccaaagtatgtaccctataaacaacgtagttcatatggatatgcattaaggccaagatattgggaatcttgaagcctacaaatgatcctacaaatcgataatactaggaaattttgccacacagtgaatatggcttttataccatcttcatagagaaaatgaatggcaagatgcaatcattccactccaagactatgctacagggcagtatagggacttttgaatagtatgtcatttgtttcatacaacatggagaactaccaaggagatgaattataaaggctagctaacccccacctctatcatattaatagaacagcatttgatactacctgagcctaaatgcacgttggcctacttctgagtaaattgctgcccatttgagcatgttgttcgaccaagcaatggactatactacaacatagcctccagatcttccgaaagatgatgcccaaatcgctaaagtagccaccattcgacgtggaccaacaggcacaggtgtaattgaccacagatacccacatttacgtcaaattttcaatgagttcatcgcggtgtcaaggtgagatgtccctagtgcttccgtagccccaccgggtagttcgaaggtatatccggcgctcattctgaatattttacttgcattttctctcttcagccagttattctagatcctaagatgccatggaattatcaagcaatataaataatcgacacattcttcgatatgtggtttggcacgtgaattgcatctggcattatttcgttgcggcatttgtgctacaggctcgggaaccatgctctgctccaccaacctcacaacttggcgcccttcgaatttttatatccaaagttgcatacgttcattcgtgccaattgtaataagatcctaacacgctagggcacgaataatatgcgccattcatttttactccatcggggtcgaggcctttgctgggcatccagacgcgccttcagtggcgctactcatgcacaagcctgccatacagagaaaaagcagtgctcaaagagcatcgagcgcgagcaaaagttatctcaagccccaaaatgtgccaaaactccgcccttgcaaccccttccgacgctcagtcttccattttggacctgcagatctacctggaaacgagcagggatcaataccctccgctgtttggtgggatgtacaaccggtgatttctcctcgctatggatcctacagacctactaccccgagatgggtatgagcagcgcaatggccttgtcgagtgggttgcctccttgaacggatctaattgtattgggtcttgcgtgctaagaataatcatctagtggcatgcggtatcacgacttcagttatcctcgagacaattctgctccgccggggggctgaccagctttcctggccgatggccgctcgtactgctatgggcatgagtatggtttcaatgttggccatggaactagctgagaatgcagttgactatcatctgaccggtggggtagttgctcttggagatccaaatttctggctggcggcaatgttatcgatcggtgctgggtatttggcgccgttgccgtataactatctgcgtcttcgaaaatatgggaaatcttgtcactaatctccatgtacctatgtagtttgctcacctttacggaacaaatcagtttaatcaactggttcttttgtttatgttgaataccctggctgattgagataatccatttataggcggaggcgttagataactcggaggataagctgacttactgtttttttgtctatttcttacttacgatacggaaagaagggtggaatcataattggcattgtttgtttaagctaatacctgactatctaggatataaagatatcaagtatgacacatggccaaggggtaggggtaaatccacagaattgcacggtaattgctaccgaggttatctgagctgggcatcgacaatcgacgggtgagttttcagtaattccttcaaccggaagatacttgaggatcattgtctgtggcttcatccctgaaagtcacgccttgtaaaattccacggtgacaatggtgagggttcagacccagggaacaatccttcgacggacagaacggtgctctggtagcaggtcaaaaggacccggggataagcatccgaacaatcttggggttgccgatccaaagtcctggtcggcataaaagaaacgggcgagcaaactctactggaaagaaccctgatagtatgcacggacattgcttcgccgagtggtaagacgggcgaacctgttaaaggttgccctgggaaatgttggacacaaaagtcactcagtcatagttgccaccaacttggctagcgaaagcagtagagacgctacgggcatcatcgtcgtcgtgcgtgttttggcccggcacgccgcgagtcactcgaatgctagcggagctgcctccgaagatgctgccgttgtccggaactccagccctgtaaggctcgcgtcctccagactcgacatagcgcttcaaacggtcagattgactgagactgggctgcttgcccatttcattaatgctcaggccagtgagactgacaccgccttgatcaacgctccgtccgtcagtgacgctggatgtgacatcggactcagtggcagcgactgactcgccagccacactgggggctcccttgggtcgcccaccgttcgctcgacgaccgccagagatcgcaggccaggactcgccaaaattctggaacataggggggtagccagatggaaggccaacaccaccaagtgccgagccatgaacagaagatacatcgtcagggatatagcccaccacagaccccgagtcatgatactcgttgcggtgaccaccgttgcgaccattcactgcattatttgggccattatttgtctgactgaaagacatctggaaccgctgcgggcctctgtatgcttgcttgggccggctgaattgaatcaaggactcctgaaggttggaaagcggcccctccacaagacagtggcgttccttgaagtgctgcaaaaggcaattccacaatgggtgcttagacaagaccttggggtttccgaggatgaccaggccaaatcgagcacgagtaagggccacgttgagacgacggggatcgctcaggaaaccaataccttggtgatcattagaacgaacacaagaaaggataatataatccttctctctgccttggaatgcgtcgaccgacgcaacctcgatctccttgtaatgttctttcttgaaggtaccgtttgcctgcatagagctgacgatgtagctccgctgtccctcgtatggagtgatgataccaatatccctaggctgaacacctgccttgaagaagcgagtgacaatcttctcgacgttggtagcttcagtacggttaagatacgaggtgccagacgcggagatttcttcgttgcccaggtttgaccaaaacatcatcggatcatcaatgatgggccaagggaagtcaacgtcacggcggacacgatctgcaatggtgataccgttctgcagcgagccttcatagaacatattggatgggaattcggaaaggcacgggtgcatacgatactggacattcaatcggataggagagcagcccaaaatcacgagacgctcgaacaaagactggttcagaccggccttggcggccttcttgttcatgatcacagggccaagttgctggtgatcacctaccaagaccacttgtttgcagcccagaactagaggaatcatacactcgggctcagcagattgggttgattcgtcaatcaggacagtgcggaacttgccctttgaaagacgaggatcacctgcaccaacacaagtacagcagatcacatctgcgttagtgagaatttcacgctcagcagagcgagtaagttgcttcaggcgcttttcgtcttggctggacaattccccaagttctgccttgagctggttgagttttaccagctcaatgttgctatcgttcatgcgaacctgctcgtgcagcgaaaggaaaccaacggcagattccacatcttcgcgagatttagcagtaactcgtacggtcttgagacccgtccggtgaatacgttcgcagagctgatcaacggcgacgttggatggagcgcagacaagaacttgacctccgttgatcttggcaagatgatagataatagtggccgatgtaacagtcttaccggttccgggaggaccttggatcaaactgagaggtcgttggaggacacttttaactgcgttaatttgactgccattcagatctggtagacctggaacactaaatttctttggaatctgggtcttcataggagctgcagcaacctcatggccaaggagacgatggaaaatgtatcctgagacactctgctcatctacggcaaaggtcttcatagcacattgcatgcggtcgaaggaagtcgacttccagacatagtcggccataaaattgtgcgtgcattcggtgggaactgacttgtggtcgcccttggcgcgaagttcaatagtgacctcatcagattgattgttcggaatcttgatgacatacccgacaccctcccacttaggacgcaattcaccattgtacttgatgcgcatctcgtcacccactgccaatttgacatctcctagctcaagcttaggcagcacaaagcttgctagatgcttgttgttgagaccaagatcccagcgcacgatcaatccatcttgggattgagattccttcaacttgcggtcgtaatcagcctcgatcttaacaagtgggccgaaaatattttggtattggaaagcatcgtcgtagcgaagtaggactggcgcaggctcatcatccactgcggtggccttctctaggtcttccagagtcgcctgagagttgtctttccacatttcctccagtttcgcaatcaattgaggactgaggtgacgagctcggagttgttcttggtcagtaggtgctcctacgagccaggggaggaaagaacgatcctcaataagaggctgccatcgtgaagtgtcccaattcatgtccttggaggatggcatagaggcacatggctgccgacaaagcaggacaacaacagtatcggattttgcggggatgaagccaagcaaaaatacatttttggtgccacagttgtagcattccagaatagtatctcctaaagaagagcccgggtggagttggacttccttatgacgagctcggacaaggtgattgacgatatgggacgaagaagtattgccacgtgcactgcagaaccacttattgcaagcaagacatttgacgacgctgctcgcgttgtggatgccgcagtatctataacataatcagtaaatgcgatccactaagggaatataaacactgacgcgcatgcatgagcagggagctctatttcctcctctccatttccttgggacttctgattcccatttgcgggtacaccgactgtgctttccatgtcgtcatcttcaaaggtttcagagccttcatcttcgtcatcatgtcggcgtggacgtgcgcgcccaagtgcaatctcattaacgtcaactcccgccgaggggtcctccggttggtagctcattatggataccgatttggaacgctgatagggatgactggagctgatcaagattcaaagcaaaaagcgaagcaaaaagcagttgaaatcagaaatgaacttcgcagtcgtaagcgatttaaggagcgtagaggacaatccggtcgtcctatgggggtgttcaaggtttaaaatctccagggtgtgcctgaggggcaaatggatggagatctatatcaagatgtacgattagcgatagattattgagaaggacaggtgagcacatacaaccagtccagctctctgtgtcagaggaccgacaaaagagagtcgatgagtttgtcttgaaggatgagcaaaaagtgttctccaatagcccagattctttatcggtgggatcccactacggcgtcccgtaccaaccataaacgcagccccggagttaagagaaaaaaaaagttgcccgctcttctttgcttaagccacttttactcaatcttcaatatgctggtaagtgaaggatagatttgacatatttgacattatgacttacaatcagtagcgccgccaaactcgcgagcgccgggattatctctatcggagagctttgctactccgtgatgcctcgattgcagaaaaaagatcccaactcaaggcttcattggcttctggaaagcctctagatcctacaattgcaaatgataaatcgcttcgggaagacttcaaatatgacgaatcgaagggaaatgaagacgctgagatggacatcgatgatgaatatgttttaacctccggcattatcgacccccgtcctctggttaccacatctcgctcaccctccgctcgtctcggcgcatttgcgaaagaaattcgccttctccttcctacctccattcgcctcaatcgtggaactctcgttcttggagatctcgtctccagcgcaacctccgcggctctgaccgatatgattctcctccacgaacaccgtggtaccccgactgcactcacgatttcacatcttccccacggcccgactgccagcttttcccttcacaacgttgtccttcgtcaggatattccgaatgccgcccgtggtaccgtgtcagaaagctacccgcacttggtttttgagggattcaagacgaagctgggtgcccgcgttgttcagattctgaaacaccttttccctccgcgcgagaccggaaaggttggcaaccgtgttgttacctttgtgaacaaggacgacaatatcgaagtgcggcaccatgttttcgttaagactgggtaccgggatgtagagttggccgaagttggacctcgcatgacaatgcgccttttcgagatccgcggaggtactctggagaagggctcgagtggcgacatcgaatgggcccttacccaatacacaaggaccagcaaaaagaaggaatacctatgattctttacgaactcgcatcaggctgtggtgtggatggttcaggcaaaattcaatcccatcattgttggtcgactggcgtatatggcgttagagggcacttagaatgggttcttttgtaagttagttatgatttaaatggcagtggagaatgtctaatcaaaatattaaagacatgtacagcagctttttgagaccgtggttgccgctctgtactttacgagactatgtgtatattattctagcatactggtccctccttggagctggagtgaccattgactttctagggctaaatatgcagcgtgacccgcatcccccacttttacttctatcaccttgatgttgtaggacgaagcctgtgttcgtttgccttacttacgatataatttcatctttagcggacagctagcagcttatatattgcccgtagatctaaattgatcaactccagcatgccaacacggaagggcttatcaagtttgatgagattcgcgaattaggcctcatcgctgtcctcctactcaatgggaaacagtgaccaaggatgcgacaggttgggaaaggattgtttccgatgaatccgttggccatttttcatattcattttaagttgtaccggtactttgagaatatctgccatcagttcacccagcacagtaatctcacaagtactatcgaactttctatatgatcttggaatatcactcattttgaacagccccatctcatgtttcataaaaggagacggcacttgtctaagcgtgacaccatccatatgtagtatgattggtttcataattatcatgggaagcatttctgaaagcacgagaatagagggcatgtgtattacgtgttgttctaaaatcatcgaaattgcattcggcataaaacctgctcttggcgtgacctgtccatgtgcatcggggaattcactcatgagtgcaggtgttaaccacctggagggattgccatcatccttaagtactacccatcgatttcctccttcgcctcatcatcatcatcatcatcaacttcacatccgtcttcaccaccatccttgacttgatgatttgccatcttttcctcgatactatcctccttgataccgtcgcatgcgatgtcgcttgatccttggcaggctgtgctctggggttccttgagaaatgcactaaggatagtcgtcttttcctcgagatagaaccaaccctcgtgaacaggcaacgtgcttccgtccatgtcgatatttgggggtggcatctttccatttgccctctcgtcccattccttgccagtctgttctttgaaaaattgcttgaatttgtccacggcaatctcaagcttaccccttggccccgcaagaagttcaacattggatatgccaacgcgactgaatttggcgtaggtcgagtaggtgtgtggttcggcagtagattcgaaaagctaggtaatctcaatacctttttcttggacgtattcacagaacatctcaaattacttacagtcaattggtatttttccctgctagtgactggtggttttgatgggcggaataaggtgatgctgtaaaccacacttgtctttctgtcctggtaaacctgacgcacggctgtgatgggtaaatattagacctgtatatgtcatctgagaatcgtgcttacgctttcttttgccctttgggtcgatgaaaggatcggctgtagatgacatatcagtaccgtccgcattatagcaataaatgaagcttcggaaaaccagtacctatccgacgtttcggaatctttgttttgatctccctcaccacctttggggatttagacttcggtgtgaccttgtttttctggggttccttattctcgggcttcatcagattcttcagaagatatggtccctcaggctttggccggcgtgtgtctgatagcaacgagtcttcaagccaatcatatgagacgattttgacggtaccgatattctgagcagtctccactgtatgttgttgattaacttaaggtctttgaacgatttaagtgtaatatacctggaactgcatggctcttgaatgcctcctttgttgcaatgagatgagtgactcgcgggttcacgtctctcgagaactgccctccatttgcccgaatccactgtgggatcttttcgccgatgccgtcttggaacttgccgactatagaggcatgaatcctttggaacgtcttccccattttgagttcacactgctgtctgagaattgactggatgagtctggtgtttccgtatcactggcagcggaatttccacttagaatggcctcaatatgagatatgtgatgctgtcaggaggggagactggaacaccgcaaggaccagttttataggcaagaggcttgcttcagttggtctttgctagctgtagcaatatgtcagaaatgaagtgtgtatattgctggaaagcaagtctttgagagataatgactgagagggctagtttgatgatgcccagcctcgtttgagctctgatgttgaccgcgatgtcgttcagaaagtgcgagaagaacctcagaaatgagatatttctattaccaggggacaagacttcgaggcaataatgtgatatactgcacagagctgtcaacttggtctgcttttgcaatgttgatatggaatgcactaagcatgatgatttctagagggtgaaagtgatgagaaagtataaaatgggatttcgaaggcaattaaagacgcagatctactccaagaaaggatcaaaattcattcctgttggatatccactatagccttgatcaaacaagtcaaattaaagtgatactagaaagaaagaaatcataagtttgattgctatggatattgttcattatcggatatgcaaccccggaatggaatgagataagaagtcattctaagtaatgtcatacacgttcctaactagttcattgccgaatgcttttggcagacttgacaaatgctcgaattttctccaaatcttgagcgccgtttgtctctacgcctgagctgacatccaatccgaccactttgtggcccgactggcccagctttttcaccgtgtcgaccacgttgtccgggtttagccctccagccaggattaccctcaatccatcgtcactatcgaggacctttttgaccccgccctcctcgagaagctcgccagagcctccggcaccagagtccagtaatggaagagtgtggtatgctctgcgagcaatgccaatgtcaccaggagcgaacttgcgaatgacaggaactggaatcaaactagaccattccaatggctcagacccatgcagttgcacaacatcgagatccaacttttgttgttgagaaatgacatatgacaacggctgattcatgaacacgcccacgagcaaagcacgagaagggtgacgcaagatattagtagagtgatcaaaccattccaacggtgtagcgttcgacgactgctgcaatgtattggccgaacgaggggtcgacttaaccacccgggaaatgccgagggccacatcatccgagacaagtcgtgagcgcccctgaaccatgataatgccaatcaaatctgcaccagcttggatagcagccagagctccttcttcagtccgagttccacatattttcaccaacggggaacttggtgtagcaccagcagattttcgattggagccgccgagaagctgtgccacaaaggcggaggtatcaggtgccctcataagagcctctccaacaagaatggccttaacaccttctttcttataagcctccacaacctggggccccgagattccactaagggcacacacaattgtgctctcaggcacttgatccattaggcgactggtagttccgagatcgacctcgaagcttgtcaggtcccggttgttgacaccgatgacttcagaccccaggtcaactgcaatcttcatctcttcgggggtgttgacttcgaccaggggctccatgccgagactgcgtgagtaatggtacagtctagtcaacagctcaatgtccagcatcttcacaatgagtagaactgtatcagctccagccaaacgcgcctccaggatttgatactcgtcaaaaacgaactcctttcggaggacagctggtcggttggtgagtccctccaggctctggcgaacagcccgcaggtcatctatggtgcccttgaaccactccggctctgtgaggacagaaatgacgctagcgccagctttggcgtactcccgcgcttgagcaggggcacatacatcagccgagatgatgccctttgagggtgatgcacgcttgatctctgccataagtgaaagaggatagtctgactgtctcaggcgctcagggaatgacagctgaggaggcgcaatgttcagatcatacgcggcttgaagagcctctggccgcagagccggaattttcttctgctcgtcaacagcaattttgcgatgagagtaaatcttatccaaaatggatagcttcttgtctactggtgcggcggcggctgctccctgcttgttatcccaggtcccagtggtgagctctaagaagtttcggaacatcttgcgcccgtattccgtcaaaatactctcagggtggaactgaacaccttccactgcgaactccttgtgcctaatacccataatgatgttcttgccactaccgtcccccagctcaactcgcgaggtcacctccaagcaatctgggatagtcgactgtgttccggcaagcgaatggtatcgagtgacctggagcgaggttggcaatccctggtagacacctttagagtcatgtttcaactccgatgtttttccgtgcagaatttcgccggtcacatccaccttaccaccaaacgaggtgatcatacattgttggcccatgcacacaccaaatatcggaatctttccgctgaaatattggattgcggcgttactaattcctgcatcggtctcggggtggcccgggccaggactgataaccagctgagtaggcttctttgcagccaagtcctcaacagtgacttcgtcattgcggtatactgtgacggtagcaccttcaagaaccaggtactggtagacattccaggtaaatgagtcgtagttgtcaatcaaaatcacgttggatgcgctggccaatttggccgctttggtggcatggtggggggagtggtcaaccaggtccgccatgaccacggattgttgtaggagatccgggggaaaggattgggagaatttgggaatcggtattctgcaagctccggatctcagacacctaaaaccgaatcaaatgtttgcgaattatccagttggacggaagtgagtcaaaaagaatgtcccggcttacttgccactcaccgcccggcaataagatcagatagggcacctgattgttgacccagtcgcggtgaataatattcttttgaagctccgtctcaattcaagagcttcccacgctcgccacctacctttttctttgctctctcgtcacctttcctggtgtcgcctcgtttcgctcttcctttctaccctatgatgatctaattgcccaacatggctcccgtcccggaggcctatttcccgtccctggacaagtgcttctccggggacgttcaactcttgtatgtccactctcatcatttgtcgttatagaggctaatatgctgatacaatgtaggtcatggaaaagagcttttctctacgccattgatcccgaaagtcatgctaatgatggaggcaatatcgatgtcttcttctcacactccgaatccattcgcctactctctgatggcctaaaaccgcccccctccccctccgcaaaatccaagtcggaattcgaatccaaaaccgcagcaatccatgttgagaccaatggccaaagttctttcgacctgaaggagatcaaggcggacacgctatggttaagcaagcaagccggaatcgacgagatttctgctcttcgcatcgctatcttagaatggcagaaccgcccggcagcgcgtctcaccatcggtttttccagcgaggaagcgaccagtctacagagtgcggctgggaccgagaatcttcgaggctctctagccggtcccagcttcgccaacctattgaaccaaacagccagaagcgacggtggtcaatcatttgaaaaagaggagaagaggcgcttgcgactccgcgaggtgtatctctccgaggaaacccatgtcgtaaaaacactccgcaagctgcttgctctgtccctacacgatggtatctcagccgactcgaccgccagtcatgatcgcaaacttgctttgcagaaggtagggaccacaattttccaggacaagtcgactggtgatggattggaccggtttcttcaagaatgcatcagctcgatacgccgtcggttaacgagtttggaaggagacggtggctggctcggtgccacagaaagcagtgaggaactagagaacatatggagaacaagtctcgtggaggagattgttcatatcgtgcaaatcatgtttcaccagcttcaagcatcggtggaatttccaagtgcagacctcctattgtcctggctccagctcatggctgattatagcttcctggagacaattcaagcggtaagccgccagtcgcctattttgagctctcggaatgttaacgttttcttatagccttgtcagcaacccgtggaagtgttgttgccccttcaagctttcgtgtcacttaccacattggcgtttttaaaacccgctcgcgccatctctttccttcagaatgaggaatacatgcaatcctcgctccagccttacttctgctgtaaggataaaatctctcaaatcaatgagattttccttactgcatgcggtgatttgaacaccgtgaatccggcagccttttcatggggcctgatcttgtataccatccaagagctggcagaagacagaagaaccagccgagagcgtcaattgagccatgctttggctgccgcctacgacgagcagacacagaatgaagcactagctcaagcatctgtgtcttcagattatgaacaattgcttgactgcgctaggactccgcaaagcacggcggaagatgctattcccattcttacatctgatttcctgaaagaatcggcattcaacaccgttatcgccctggctagtaagaccgggtcaatgtcagccgtcgatgatggcctgacaacccgatggattcggttatcacttctcgaccttatccgagtcgctattatgttcttggattactctcccgaaattgtggggtcagtcctggctatcttaaatgatgatgacaacgggctgtcaagagactcaaattccctaggtcctgccagcgatcctaagtctgtattcgccaaggatcagaatttgatggatggcatctttcgcattgcacggtcccgtttcccttatgaaacgtcaccatttttactgctctgtcgtgctctcgtcagtgggcactctttgaatgaagaaggtttgccggctattcttgaggaggtggaaactatggaatcctttacacagattgtcccacccactttccagggctatgccaccattcgagaagacgagaacgccgattttgtttccctgctccaacccctcccaatgttagaaacatcgatccagaaccgtgctttcgagagggaaccaagcaatgctgtaatcgtcagcggttcttccgaaattccacggctgaccgttggtcaagtcatttccgattcaaaacccgcggttatcatgtgggagcatcgatactcctgcttaagctttctaggaagctggcttgaagaatggagcgagaccggtgggcactcgtctgagtggactgatgacactgctgcggaaattattgctctcttggccgacttgatagccaactctaaatcacaaagctctggcgatgcaagcggcaaaagaattctagagatggctagtgatgggctgtccaaacagggtgacatcatttctgtgatcttcgatatctttgaacgcaatttgcagactatcggctcccgaggagacttgggcaagtctttggacgtaaccatggcatgtctgcgctttatcaaggcacttataaagattttacccagtcgagtatggcctttccttggtcgcagcagtctcatcgggtccgatggcaagggaggcatcatgacagcaatcgtttcagcaatggaagttccttccggcgagtatccgttcctcctcagttgtgttgaccttgtgggcgctgtcatcgatgatgcggcatctcgagcagtattgcgaaagagcccgggcagcgtgacaagcaaaccatctatcgcatctgattggagtgctggtattccatctcacgtcatgagaactattatgttgaactttattcgcacaatgctggagattttcaacagctgtggaaattggaggttcaacctaccagaacaacggctcaagatcaactcgatgcttgctacttcgttcgagcgtgttctgtactatgccttcggaatcaatgacagcccgaaactagagaccaaagtgaccggcgttttctctacatctgcggcgtacattctagatatgctgcgccctcggtcaaccgccgacctgcccttcaacccaattcttcggttgatcgccgagggtcttcagactcccccaacacttcatctcagatatcttatcctctttgaagatcaggtcaactctacactgcggctctgcatcaaacttgtacaggcagcccaactggcagaacaacctgcctcgcttctagaggaacaactattcaaagccagcccggtcttagtcaaactctacgcgctacatgatgcatacagattgccggttgtgtcgcttctcgagattttgatctcaagcgccgcttcaaatccggataatgaaccaccttcccttgttggccaccttggggcagagtcgtcctgtctgttccttgatgtactgtcacaactcgacaagccgatgtgtgacagacctctatttcttgcagtatggcagctgctatcgacatttgttagcaagcgtcagcagtggcttgcagttttcattctcacagggtcatcccctcggcagactctgaagaaggaacccacttctagtgggcttagcatgaggagcgtgcctttcctgaaactggcgcttgagaaattgtctcatattgatcaacaagagccgcaagtagccttagcgttgctcgagtttgtctctcgtgcccaagaaaattggccatgggccacttcccacctgagcaagcacccccagttcttcaacagcataattaaccacgtctcaaaattgaagatctcttctctgccagtgatggaccaaatctatgccacgcggattgcagctgttgtcgcggacctgtgcgcggtctatctgcactcggcaaaggaaatgggagaccgaagctttataaagaccttgattccattagtttcgtggtatgccaaggatgcagttgaagtttcggcttacaattcttcattgcacgccaacttgaaaaagaactttgagatgcgatacgcgggctgcaaaattgtggacttcaaaaggacaccgctcgaagttcgtcatctgggacgggattactactacgacatgagtatgggagacaaactgctgtcctacgactttgcctgggctggcaccaagaaccgtgggtttgccgaggagtttgagcgtgccaacatcaatctgtctcttgtcgaggcgcaggtggtaggttttcttcccttcgttgcatatgagtttctttactaacctcaaaaagagccttctccatagctggaagttcttcgctatcgagcattgtgccgatttcatgcccgataccgaagtccgaaagtctatggcactggtcgcgcaaagttgtttgaaggccaatattagcagtggccctcccgaggccatctttgagcgaatccaacaagcacgcgttgactttgcccaggcacttctccagcggcttgtcgaggtacatgctagaggcgccgaagtcttccagctgctcgagattacctggaacgcactgcgatcccgccatctgacatatgaagacgctttgatcaatgatgataccgattacttccggtccctactgaacgtgttgttcctttcccttcagtttcaccttgatggcccctcccggagtgcccccgaagctatcaataagagggctgaggtttcttcgggtctgactgtcatcgtggaagtcgtgaaaacaatagtggcccagggcttcaaatccctcactacttatctccatgatgcgcccgagaaatgcacgccaaaagatttcgccattatcaatgctattctacagacatgcttgcaagtgaagaacgctgatcgtctctatgagcacatcgtgtaccacattgaggaatacgacaccgctcgtcatgcgacgacgctcttctcctgggccgaccaattggccgttgccggcgaccctgtgtacgccgagctcagcatctcgattctggtcaaaatgtcaaccctgcccatgctcgcagagcaccttgctgttgatgctgtcttgatgaaactgtccacctgccgtcttacaaacattctctgccaaaagaaagcattcggaccctttgatcctgttccccgactgtatgccatctggactggtggcttccttcctctgtgtctgaatatgctctacagtgtgatgcgggccgcgccggaggtggcagcattcctgaaccagtttgaatctcgcctgacccgcgcgacagaggcattctccagccatacggccgtttcctcggttccgacatccaagtggattagcctcaacatggtctcggaagcctactcgcttgcgctgatttcgttcatcctggaccggttccgcgaggcgggtgccagtgctggagttgacgcacaggccatccaagatctcaaatgggatagggtgcaggtcaaggaagatattgaggaactgctcggtcgccgcgctgctctgcgtgcacgcattgtcgcgaccaatgaaaaggagctggaatggtcccgacagaagcctgtcgacccgacttctgagtcacagaaccgattagaggagaagcttgttagtgagctgaaggcaacagtgacgtgtttgagtggggaggattcatgaatatgttctttgtagcctttctgctatttgtctcttctttttttccatgtattctgggttggcggggtgtagtaaatgaattatttcttgcatgaagctcaagtttcaaacaattgcattatcccaatccttcattcctttggattctatttttggagtggactatcacatgcaggacaggacgcctaatttggggaaaccaagttggcttgatcctaattggtctcttgcttgcagatcttggcagatgagctaacggggtcacatccctcctccccggttctcatgcacatgatattacccgaaggtatagccgactcgattcggccaagctgcttagcggtaacatcaatagggttgggtttgaatttggaggatagccgtggagaaggggaatattatcggcggtgcttgatttggcgaaccgatctatataggcctaaaagcatacgttagcttcgtgtgtggagacctagcagtcttgtagagtggatgtttttcggttgatgaatgcaagaatagccagcctcatgtggctgagagcggcatgatccagtttgcccaatgggagtctttctttggtagtcctttgcgttctattctttctaaatatccttgggtagatggcggaaagggcggcgtataacctttgatagccagcaactggcattttcaatagtgcaggctatattggtgtaggatgtttccatgtacttttctacactcgttccttccacttttgctgctgtggcgacagtaagttacaactcaactatggaggtaggtgtgaaggggtatagttggttaactagcggccagagtcaaatacctgacttttgccttatgttaatgggatttagaaagaaccgcatggtttctattcactatgagcttagtacactagtcccatgactgatctattactcggtacagcgtgaaaaccgaggctcgggctagtcaggttccccgcaaatcctatatgtatagcataaccgataatgcggggagattaactgcgaatcatgcaggatttaacgttctactccttatttataagaccccctcgccgttatctttctccccatatatcgatagcattagcattaccaaaatgccgtataaatcccgctggacgattgacatcccagacatccatttagcctctcttctccttaaatccccaacggcgcctctttccaagacacacaagtgctatctcgaagctgcccgtccagaaacccactatctcgccacctatgatctccgtctctggagccagcggttcgccgccggactacgcaaatcaggacaccaacgaggagaccgcatcctcctcttctccggcaacgacctcttcttccccgtagtcttcctaggcgtgataatggccggaggaatcttcaccggcgcgaatccaagctacgtagcccgcgaactagcctaccaactccacgacagcggcgccacgtacctaatctgtgctagcagcagtctggaaacaggcatagaagctgccaaacaagccaatctcccccaaagccgcatcttcgcctatgacagctccatatacaacggtgtaacaaacccgcaaaagggctgcgcatactggagcgacctcctcgcctcggaagaagaaggccgcgctttcatatgggacgaacttaacacaccagctctgtcgtcccgcacactggcactcaactactctagcggcacaaccggccgccccaagggcgtcgagatctcgcacaagaactacgtcgccaatatgctccagtactgtcacacggcaagcctgcgtccggactaccaggcccgtcttgcgcgttcccgctggctatgcttcctgccgatgtaccacgcgatggcgcagaatatcttcatcgcggcggcgctgtaccgtgccacgccggtgtatatcatgtccaagtttgactttgtcaagatgttagagtatacgcagaaattcgggattacggatcttatcctcgtgccgccggttgttgttatgttagcgaaacatccggctgttaaagggtttgatttgagtagtgttgagttggttggaagtggtgctgcgccgttggggagggaggtttgtgaggaagttgagaggttgtggcctcccgggaagattaatattaaacaaggatggggaatgactgagtgagtttgttgttttgctagccgattcttagaaactaaactgatctgcttctgtatagggcgacttgctcggttacgggttggaacccttgcgagattagtacatcttcgtttgtcggtgagctcaatgccaattgtgaggcgaaaatcatgtcgcttgatggagccgaggtgaaagagcgaaactcgcgtggcgagttgtgggttcgcgctcccaatgtcatgaaaggctactggcgcaacgagaaggccactaaagagacgaagactgcggatggttggctccggacgggcgatattgcctttgtggatgacgatggcaaaattcatgttgtggatcgaatgaaggtgaggttttttgttttacaagaagaaagaagaaaaaaactaatacgaacaggaattaatcaaagtcaaaggcaaccaggtggcgcccgccgaattagaggctcttctacttgaacatccggcgatatcagacgtcgcggtgatcggtgttatcgtgtaagtctgactttttttatgggtctttttttttcttcgcttctgatcctgtttagcgagagcgatgagcgccctcgcgcatatgtggttcttaaaccgggccaatccgccacttcgaacgacatcgcgcatttcctggataacaaggtttccccgtttaagcggattaccggcggaatcgtatttctcgatgcgatacctaagaatccatcaggcaagattcttcgcatgaaactccgcgagcaggccaaggaggagctaaagagagtcgctgcgagactctagactttgtttatattacaatttatatatcctagcggtttaccttttttccagggatgaatccaatgagtaggtataagagatgcctcggcacaatatatagagtatgtgcaccattctaatttcgtgtgtccttcggtgattggcagggtacaacagccgagccagtcaggccaacccctatatggacagtgcacactgtcagaagatggggccaaagggtgagggaaagtagatgaatgattgttcgcatgggttcgcgtagcccactaaaatagccgagtagggcatctcgcggtgtgattcgatgtatgaaatggcttagcgcgggggacccatgcaggcgccagctgaaagccaaagacaaaggcgatctccaagaggcgtatggcggagtactccgtacatccaactccgtacatttgtcatgatcgacatgtttctctccgcgggcattaataggtcaaatatccaaggtttcagggtcctaagaagaagataggcatattccttcgtcgtgaacagaaaaaaatgttaaaccggtggcgttaagaaggtaagctgagtggagacagggctggctgggccttatttatccacattttggggtatacttgtcagtcacgatgttgtacggcaaagagatcctgttcgttctgtgttgcaatttggattttgactttgcgacctgtcgactaattctgatttgccacgttaaaaatatcggcactcggtctcggttttcttccgtcagatgtatggcagagaaaccctatcttgcagatactatatcccggtatgcttcagtggtgatcaccttcgatcattcccccactatagtctaaattgggtctacaactccataatactcaaactctagctctttatatatcacctaaaaagcccacccctgcactccatcccactagttccttcccactcgcctccccgccaactccgcgcatagtctcgactcgacactggtatctttgactcgctaaaatcttccaaactctggccatctagatttactttcccacacgggcagttaagttgagctgtttccccattccacaggggaggcagtttcaacatattcttcgcgagtggtggacgctatccaaccacccaacaccccgtcatgaatgctgtggaacaaggatacaactacctatcttgtgacctcctacattcgaccacaaagtggtttctaccagtgaccagcctggtcagcttttcacttctcactctcatcctcctccaccgatatatcaaatatcgtcgtatgagacaagcacacataatctctacctctggattcaaagaaaagaatcaagacgtctggcttcaatctactgccatggaaaaaggaaacatcctctcaccgggctcgcacccatcggcatgcgatatcctgcaacctttatcccgtacaagcctcctgccaagcagtggagccctcgctgcacgggcccgagagcagcaaagtggaagtgctgcatcttcgatggcttcctcgcctgactgcgaggtgcaaaaacacattgaatcaactcagcaaatgtgcgacgaggatgccgggggtgtgcgcacttggaaacgtcttgtcgttgagtatcgatagttggccgcctgtttccggggtttattcattccgtacatttgtcggacttgagcggtcttcttttcgattgtatctcagccggggattccgtgggactgttatctttttttttttcttgctcttttgttatgccttctttcttggtttcccctccctatcgttgtctttactattttacgaataatgagaagcgtgggcttggtttgttttgggcggcaaatgggttcattttgttaagcatgtttagcaatacatatacatttgaatatgccacgtattgtggttatgatacattagaagaaggttgaaatctgataattagccgcccttgtagctcgaggaacatcttcagaatgcttggcttgattgtataattgaattgtacatgatcaactagttatcaatcatcgccttgttcgatgtgatcggtcgcggatctggaatgtatcagcgacaagagattcagatatggattgcgttgtaagacatactatatgagggttttcaagagcagattgatcgcatcaagatgcgattcgagcttctgtcggtatcggctcaaggactcacatctgagatgccacatgatgcgtcgccattgtgttttgacttgaacaatcaatcgtcgagagtgcaagaaattgaatccatttccatcaggtgatcctaccgaaggcgtggtcactgttgctcggtacttttctgtggcgctttcgagatgttctaaggtttggaggcacgatcgtaccattaaccctaattgttgagatagatcggtggcgccagggtccgcagtattagagtttctggacaagatatccatagcagctctttgcaactgactcagggagcaattcaaggcgaacagaacatccccaagttcttgtagatcgcgtggtgcattctcttgacctgaggttgcggctgtaagtaaccggcaggtaatttggctgcagagtacaatatctccaattgagaaaccgaacgacattccgccgtcgaatgtgggaaaagaaacaagaaaatgacaaatgagtggaattgagaacagtaatagggatcgaaaaagggttggtgtagtataggtaattcaagtatcagatagggtcctctgggcctcgttaatgcgtagccctatgtcgtagatattccgcattcctgcagatgacaaagtttcagagacaggggctggactgagccagtgcatgtgtctgccccatactgtgtaccaatcaggatcatagagatctgtgcagatgcctatatatatctcctctgattagcacctcttatgtcaacgaatgaaagcgaggggattcaatttgtccatatagaactttgtttagctgtagccaactagtctttttgtatctaaagcggtataaataatgtagttgaacccaagccgatccacaattctgatccggatgatcccgagtcatcttgaaagcgtccaagtcccccgcatatatgtgtagtaaaacgtccccatgacctgtaaggcacgtacctatgaaggtatttagctctgagactctggtggtacctggtggttattcgtcattcattgggcacgcacggctgggcatctattccaaagggttcagctacacggtcaagtcattacctcccaaaatctcccatacaatccgtctctctcgctcttcacagctctgctttctactaaattgcctgctcttgctctgtatgatggctatcccgatcgagattaagaaatccgcgacagccgacgaacttatcgagttcggcaagacccaggcataggtcgtttcgcccgtgtcccttcaatcactaaattagcacagctgaagcatgatgggtgcactatcttgagtgaacgaaggaatatgatcaacactatcgatgcgccggacaatgccatggctatcatagtcgatatcagcgcgccaggcggcaaattcgttattggaaggcacgcaccgacgccgtggggcaacgacgtagtcgcggaaagagccacagagggcaagacgcacttggtaatctggccatggcagccggaatggcaattctatgcaatcggttcgaccaaaataagataccttgtaaagccctccaatgctacataacctagcataaaaggcccccgtcagcaagagaggtcctgtcagctgagattttgggtgatgagcccagtgaaagctctacaagatctgtcaatcgatcacttcatcgtcgcgtgatctaactcggccgtttgatattgcgaatagaacatgaaggaggcatatagtggagatattcggaggcgaccagtgcctcagacttgttagatgaatcgcttgtagctgtcaccacagaggcaatttcaccaaattgctagaatcgtcatcatctattggtctttaagtggggtgagccctcaaatcgaactgtgacgtttccttgacgcatgccgtcctgtgagaagcgaatggtagcgagcataaaatatatcaaattccaggtatccaaacagaggtcaaaatgtaggacctgccatagatggaagattcaagattcaaatctcagctgacacagccacgcagccacacaaggatcatccaatccttcaggcttctctcctctttcacgcatatgaacactcatcattatatgatcttccacaatgtacttcatccgtctcgctccaccgaccgcaagaaatcctttgattcgagccatatcgtcactcgcgcctgggagtattcttcaaggcacctattggaactaccgcattctcaaccacaaccacgttaagggggatagcacacatatctctgatgtcttcaaagccgaggtcattccacatgagaattatcataacacccccaaggctcccaaatggttcatttatcatataaagatataataactagacttaaaggctaacttggctgcatagggcttttgtcaaaggggctttacctgacaatgcaactgccatactgaatctggaacgcgaacgtcatgcttatcatcttcctggtgtctcttccagtcagtacttccggaagatgtacgacgtgatcgacgatagcactatcgccttagaatggctggataccactcttgcagagttgaaataccagcctaatgatatgggcactcattcacttgttgttgctgttctaagagcagcactgactagttgtgccgttctggaggactccaaatatgtgaatacaggtaaagtccctattcttgaccttggaacgttggaatagttagcatatactaactaccctagactataagcctgctaatattctgctttctggcatcggttctgactgtatcatcgccaaagtgggagacttggggctcagtaagcaaatactaatagacgaattacgatttcgctaatatcacacacttatagtggttccggttggccacctacgccacgcccagccatatgccatgcgagcccctgaagtctaccttggccaagcatgtgcagagccatcgcaggtcagggcagttgctgcgatgtttctttgctggatcaaaccgggtgtgttaggcatgtggggtagctatcatcctttcctgaacgaggcttggtctatagtaaagattaagcgactctttcccgagtgggacattccgacacctgatgaggtcgatgggcacttaattaaaacagtagtaaattgtgcccagtctatgactgaaaccgagccaaaactacaagaattcttaccttttgacgaggagacaaaaacgttggagatatcggaccagctgagagatcttcttcgtttcatgttggtacccgatccggttaaaatgccctccgcttcatctgtgctggcatcgagggagttgcaagcttttgagaatcttggcgcataatctaaccatgtggacttgtttggatagattacacccatagatgtatatactgtagtcaaattcaacccgatccacttgttaagttgttccccacctcgggagctgcgccaatgctgagtcatcacgaaagcgcgccagctctacggagtacatcgatgccacatcttcaacctacaacaacttacttttgtaattccaagccacagccatgaccgtaacgacattcccctctgagggatctccagatctcgcccttctcaatgttgctcgcctcttcaccagactcgagcataatctcctctctccggggacagaccggcgggcattccaacaatcagaatatcagcgtatgcgcgtgaacaaggtaataaataactccatccttctagaactttgcctccaaagcttcactttcaagagacaagtataaatctaaccaatgccacagaacgtcgaatacgcccgcttactcctcacccaactcgagcgctccctcccacaaatcaaacccctcgaccgcaaacacgaagcacaagccgagatcgcgcgcgacagacagcgcctgaaacgcatacagaccgtcctcgaggaagaagcagccaaagccgaagcgaagcaaggtgaagaagacgagactgacgacatcgacgacgaatggaaggagctattctccaagcccgtcaccgagaagaaaactgtctcgcgtaaagatcagcagataccgacaaggccatcagattcgcaacgagaagtgaacggagcgagccaaaccacgattacctcttccgcaacagcgactccagcaacaacaactccaacacccacaccctcatcaacaagcccaccagcacaagcatcagcaccagcacccccgaccctccgcaaccgctacacaactcaccccgcaccgccatcattcgaaaaagcagctacgactggaagggatacaaccaagctctctggaacagaatccgaactgagcacccacagactggaacaggaagatctgacaagctctctcctcgcgcttgcttcgcagctgaaagcctcctcgcataacttccaggcgacgctggaaggcgagaagtcggcgttggaccgcgcggtgtcgggcatcgaccgcacgagtaccacgatggaagcggcgggtaagaggatggggatgttgcgcaagatgacggagggcaaagggctgtgggggaggatgatgctgtatgcgtggattttcgggctatgggttgttgctattctgcttgtttatgttgggccgaagttgaggttttgaaactggcataattcagcgctgtcttcgtctctgtctatgacagtttgattctatctttatgcggataccctttttttttgctctgcatatatatctctgcaaataacactattgtcgatatctacttgggagactgatataacacgcatcgaggtatagaaatagtatggaattaagagtcagaaccttaagagtcaatccttgaactctgaaataacccaacgaccgactggcatgacacatgagaaggaaacattcaaatccgcggatcctggcatttccccgtgcccaatgcccggatggacgctcttggcttccaacggacgcgagaccaaggaaaatgatggggggagacgatatggttacatacataaacaagaactaggggagagatgatatgatatccagcattcaaatcagaaggatcacaaaaaaaaggtggaaaggaaataggaaagagaaaaagaagggaggggaatacttcttgttttctgtagtggatatcaggacaagagaaaacacaaaaaccggctagaggctgtgtagatggcagggaaaattagaacgtgagcaaatggagattaggaaaaggaaacgcaaaagagaatcaacgccgggatctcgaaacggggattttcgaccggttctgatcagccccggttaataaaaacatgcgatctaggttcgacatacttcaccaaacgatagttcattagatcaaaccgcatagacggagattctcttggatgatgatatctgtgaaacgttagacaagtgttgcgcactaggttgggatggctgagcttaccgttcactgctgccatgacgaatcgaatctgggtagtgtcagttgcgcaggtgaagtgcgtgtagatctgcttttgctcggcctggttcagggagacgaaacggttgaggatatagtcgcaagccgcggcgtagtcggcaccaccctcgtaatcagggaagtagttcttcatcgggctaacggggagcttttccttgaaacgatcgatcttgttgaggaacagaatgatcgaggtcttgacgaaccaccgggaattgcagatcgagtcgaacaaggtcagggcttcttgcatacggttgacggtctcgtcttcgaagagcagctggtcgtactcggagatggcgacgaggaacagaatggtggtgacgttctcgaagcagtgaatccacttcttgcgctcggatcgctgaccaccaacgtcgaacatgcggtatgtaaggtcaccgataatgaaagtggtctcggtgataccggtggtcttgacacgggaacggaggacatcctggtcggtggggaggtaatcgggctgggcaatgcgctcaatggaatcgaagtagctaaaggaaacgaattagccacgtcgcaatgcgacagacgagcggtcactactcactatttggcagagtcgttcagctggtattcgcgcgagcgcttgaagcactcctgaacaccagtgtcgcgccaaagttgtccaatggcgtttccaacctcggggggaatgctgtcaccctctatctgagcgggctgcatgaagatggtctgcacgtggtactcgtggcgcgcatcctccaggggcaactcgagggattccatggcctcgagaatgacgcgcatcgactggacggtattgctgtagatgatttccttgaatgattcacgctcgtcgcgagagtatccaccctcgtggatcagcttcatctgcttgagaatggtggacttgcccgactctccggctcctgtatacccagtcagccatctgtacatattcccatcggaactcaatggatcataccgagcaacagcatcttgatctcgtttctttgcatcatcttgtcgcgcttgagctggttctcaatctcctcattccgcgccttcccctccttatcttcggtgctcattccgcaacccattttgacggtatgaagtcgcaattaacggtgtgaaagtggatagagggttcttcgtggagggatattcgatggtttgttacagggactgtacaaggcgaatcactgtcagcaagctggaataatttcttccggaaatatcgcattgacgggctcgaggaggcgttgcataggtagcacaagcaccgctgagcagaggcagacggcgtttcagagttggtgtaagcgtgccgatgcaaggagtcgccaccgagtttccagagcaaatagccaattgacaggatcaaagggggaaaaaaaagggtacccacctgaaggttcttttgcgatttgcaaaaacgaaggacaaatcggcaacagggtataaaggaaagaaatgaaaagaaacgagccagaagaattcaaatagaatccaatctggaaaagaagaagagagagagaagagatacaagttgttcaaaggtaaggggcaagacggcaagactgaggggggaaattgggaaagtttcagcagagaaaggggatacgctggtaataccacggcagttaagcagcgcatgggtgactggggcggttatcggaggaaatagtatggtgttttccgtacacagattaccgattacaaaacaataccaccccggcaactgcagtgagctgattgggcggtgtggggacctgactggcccattcagccccttttgcttttttggctggtgatatcccacgggcattgcatcagagattctattttcagaggatgtcgatgtatatggatgcatctatggaacattctgtttcagacagtcagcccttcataccaatgctccataatagagcactgtacccgggtactttgtatatataaaaatgccggtggactcctggaggcgtgcagatcttgtggagagcaaaactagcatatcaaattacaatgctagcaacaacaggaaacttagaattctggctcgtcagggagtctggggagcgaacccctgaagaatactttatgtacatttagtagatcatacaatttgctccccacacggtgcataaaccccgaagtctgacctcatctcagttctcagtttcagtctgaggaaacaaagaaacaaagcaagactcctgcccaatcagactagtctgcgcctcatcccatgcatccatgtgcagttctttgatacttccttgaaacttctgaggtacaataatacggacaacccaataggtacaacatacatagtaccatgccgagatagactgtcataccttcaacattactgctcagcccctcgactgatgaatccaacaatcctacgtcagcatgattgaaaaggaggtgtcagtgagcccagggaaatccccgaatcggttcgatagtgaaactgaagggatttcctcgttccaatggcgccctaaggttgtctccttaagttctgcagacgacccactggtgcccctagccgttttcgccgctaatttgcgtgaggagtttcaaagttgatactagactccacttggcgcctcgtggcaatggagactattgaacttcgcggtttagcttggtgtctaaacatgacctaaactggcgaaatgccgaagtcacgggatgtgctgataatacactatattacttagatacagcctcatacaagaataaattacagatcaccctccatgcatgcatgttgtagatcagttccaatggctgcctgcttcatatcaggtgacgtacatttataatggaataaaaaacccagcgctactcacaacctcaattccttcaacccctttacaaagtctacctttcgaaggactccaaccaggacactcaagagtgtactttgactcatcttttctatattctccggacgctcgcgcagcatccaacttgctagtgcgtgacgatgggtgatgccctgcggccaaatgatgatgatttcagcgaagtcctccagcagagtctcaagatatggacttcctatctaggtactggtgacaaacagagccctatcccccgacaagccatagatatgagacctctcgtcagtcagaccccgtctttcctcggtgatggccttcctttgaacgagaatatctcgttcgcttgcgaagaaaacaaatcccatgatagactttacatcaacggcagatcaacgtggaggacttctcaagggacctgtgacctaccaccaaaggtttttccaaagcaatttctattagcagttgaccgtcgattaagtgtggaattatccagaagattctcctctttcagactggcatagagttcaagggctctcgggctatgatgagggaaactacctatctgttctttactttgcatgggcttacatcctatctgctcgatgggttgagttgcttaatcgctctgctgaccacgaatgtcacatgggctacattgcggatcgggtagagggtcgattgccacagccaaacaatcaatctctggttcaaattgacatcggccacgatgcttccgtggaagaagtccgctggtggcaggctattttgggctctgacgataggtgggacgcgaccgtgaagtataatggccacatctatttgtcgtatggtcgatttcggcaaagaaggtggaattcaacttggccactaaggatgttttgagcgcaatttcagaaccaccatcgtcggaaaccgctctcaactatctctcacgtttctgtgtgcaccatcgcctctacgcccagtgctcggtcgcccttgctggggtactcttcattccattcctggggaagggaacactctcacttcctcttccaaggcaagcttctcagtcggaactaacacatcgtattaatggctcgcctgtttctattccggatcttctagctgagcacaccgaattacttcctaggtatatgacgttgagctccagcccgcaggctttgcgttctattctatgcagcacctttttcaatccagatattgagtgcaatctcgtcagcgcctggctgaacccggctcttgcgattctcaattccatctcacctaatgagttgggccctttttttggcaaatcgaaagcctctactcggacctctctggcttggtgcaattctcacaggtctggcaaatattattttacgtgacgtacggacgggaatggtagctttcgatcttacagcatcggcctgggcaaatacagcaaatacattcttgacctctagaatggggactagtgatggtgaatcaatacgccgcgatgacgaatgccggctgtcattcattactgcctgcgaaggccatgaccgacctccaatctggccttggaagccttttgggagcacaccaatttgcgacacagatctgagcgtccgacagcattttcaatgtgctcattgcctagaatacgagtcttgggaatggatgttgacaaatgacgattcaattcgggattttagaaaggataacaacgaattccctgatcaaacaccacactccgcccccagtatgacaccggcagcactcagcgattataaatatgatttctcttcgcaaatgcactcggaaggagtaacccgtgggatatttggatggttgagacgaactggttatcctcttagcgaaaaacccatataccaacattcatgggtcgatttggaaagcagtgacgaagaagaagagcccgatgatgccaaatctgacgtggaaaagcaccggagcgcaaagaaaaagcacgttgacacatggcttgacggaatcgaatagcgcttatgaatcgggtgaggccgtgatatcattgtaccaaaagagcagtctggtcccgctagctggatgatcgagacataaaaacacggtacatggccctgtattgccgtggtcagcggtttgactgatcttccaccttttcagactgccttgcacgtgtgactgttgtgcttatcattctaatgtccgcatcttaggtctctgtaaacagcccgaactggcggtcactatgatccttactcgcggacatgctctaatgccgaccaagagcctagtcgttctacaccactgcagaccaattgaaggggaaaagaaaaaaaaaaggccgaggatgatgattggacggcttaaccaccttgccccgctatgtactttccaaggcgagaatccaccgcttgcataatgcagtagatgggctcgaatacttagcccttgattgaagggattgacaattgacatgcaagaaatggaaaatggctcacggtttcagcaagacagattggcagagaagtccatatgctcaggtgtatgcatagtgactgactggatagactggatacaacctcgcacaagaataaattacctgcagttctagagccaatattacaaattgcgtagatcattccaaggatcgatctacacctatctaagccacaagacgtagatttatggctaatcggttgtaatatactcatacatatctacaacatacatattctcttctacataatatcccagctatataataaccacaatgtgaatcccatcggcgatcgttctaccgatcgaaaccaataaaccttggtacccaacgagagttcctcgatcgatgtggtttctcggtttctccactttaaaaaaggtacccttccccttccccaggctcccttcttatcaccacaatcatgtcgcacgaaatgtcccaattgggccctcggggtaatacgccaatccctcttgaaatgaacgacaagcactaacagtcccagccttcaaccacgcgagcagcagcgacgccgaggcggagtacgaccggctccgcgacctcgcgcgccaggaagcctccaagcgcggcgaatgtttcagtcgggtacgcaagcacccaatcccaattgcagttgtagttgtagtcattcgatcaccgctaacacccacccaccagtcgaaggaagcctactcgagcggcgatggcgccggcgccaagcaactctccgaggagggcaaggcccacggccgcaagatggaggagtacaacaaacaagcgtccgagttcatcttccgcgagaacaacgccaacgggcgcgtcgaggccgacaccatcgatctgcacggccagttcgctgaggaggccgaggagatcctggaagagcggatcaagtatgccaagtcgcatggacagacccatcttcatgtgtaagtgtcggaaacgagcccctaggaatttcttatcgtgtgcgctagacgcgacgcaacgtactgcgactaattccgcttcgcgatatagtatcgtcggcaaggggaaccactccgcgaaccatattcagaaaattaagccgcgcgtcgagcaggtgtgtcgggagctggggctgcagtataccaccgaggacaacgatggtcgcatctatgtcaacctgactggtggtgaggctgttatgcctccttcgactggttaccagggtggggctggatacccgggtcaacaacagggacaccagcaacaccagcagcagcagcatggacaaggacaccagcagcaacaacagcagcaacagccggacgaactcgaggagctggccaagaaattcgtgcccaggattctgcggaagctcgagaaggcttgctgtgtggttatgtgagcttgtggttcggtgtttgggacatatacatagatgcatagctgtgtttgtggacagatgtttgttgttttgcctgtgacattttgcgctgtcggtttctcgtttctagatcatctaccatctacataagtatacttcaagtctaggttcagccgacgactcatgatggcagggatgtgattatacccctacttcatatggacatggacattgccatttactttcatgctgttgaggacagctaattgaacaatttacactcccaaatccatatcataaatcatatcatcgtgaactctcatagctacatagcaaattgtgaaaacaagataactgaaacggggtatatccaacaaatacacgacttccacaaaatcatagtaaagaacaaagaaccaactagcgcgcattgggatccgacagcgtcgactccacgatcttttccacaatagcacgcaccatctgcccatcaccagctccgttgatcttcggcgtagcatcgatcgtctcaatcaacgccaatgcctgatctcgcaaatccccgacaacccgactggtgtgcgcaaagctgcccgtattcttcatatactgcaccgcatagcgcttgacctccacatccttggtattttgcttgaggatattaatcagctggcgattagacgggtccgagcgaatgctgtgaattatcgggaaggagaattttccctcggtgagatcctcgcagaaccctttattctccgtgtacacagtactcgaaaggttgaggtaatcatcgcagatctggaatatcagacccatgacattcaccaaggcaacgcagtctttccccgtcgtactctccgcctgcatcagtttcaccgcgagccgaaagagcccgcccgttttattgccgaccatttccaggtactcgtcttccgtcgggcaggtcagcgtgtcgcgccaaaacagatccatcccttggccccggtgcaggttcagcatctcttgtacgtagatgtcgattgcggccgggttgttgagctgctgaacttcttgcagcgcgaggaagtacacgtaatttgcggagttgattgtttgcgctgttccgaagatgttgtgcgcgacggggatgccgcggcggaggacggagttgtcttcgacgtcatcgattctggcgtcacgccgtcagcatcggatatggatcgggtgtgaagagggaggcggtgtggggtggactcacaatagtgatgatgtatgcagcatcgttacgaccttggtgatgatcgccaggctcgccggcgggacctgcagccaagcgttgaaggcgtggatcagttggcgccgaatatcttttcctgggtgttcgtgtacatagtcgtatggacccatgagaatcttgtcgttcttcgatgaccatgttccatccttgtacttggtaccgtcgacgctggacttgttgcgacgatgtccggtttttggaggctcttcgtctgtcaccgacagtttgtgtcggtgcgaggggctgtcggtgccatttgttgcattggtcgagctttcccgaggaggaacgggactcgatggttggaaggatgttgaattcatgattgcggatgggggatggaggggttcggtaggcggcagaaattagctagggacctccggggctagaagtttggttcatgtatagatgacatcaacacctctttttcatgtttgtatagctacatatgtagaatgatactatgataactatatcgtgaaacgtatcatgcaagatgtattctgcgtacatactttgtacctagtcgtagatggtatgatcggatgccgaggttgactaatcgggcggcggggctgagccacttgagccaacagtcaccagccaccttccaccagccacctgtcacctgccaccaaccaccagccaccgaatataaggttgacaaatgaaatacatcaatttgattggcaacgcagccctggataaactataatgatttgataggtcataagcagggacaacccaaatgtattcaataatccatagaaaatatcatgttcgctacagcaacggagcaagggaaacacggtgtgaacacggtgtgaatatacggtgtatacagtgtacacgatttaagcactccatacttactccatacttactccatactataattaaagtcgaatctgattgacgccaggggtggatctggaagaaagcgagttaagagtgtcccgatgcgtcgagttccctggtttattggcgcgttgccgggggcaacggcgctttatttactgcgaaccttggaaagccgcgaagggccccgactgacctcatccactcccaactgggacaacacgaaccttctccactttcttttttggatcttttgtttaagaatgttcctttgcttttcatttcggtagaatagctcacttttctatctcacatctgatttatcaatggaggctctattagcccattcgttcgattacctctcctcttatgagcctagcaagatccgtaaaggattacgccaggtcgaaggactcctcgcacagatatgtttatcaaaacctaagcccgtcttggaccggagatcgcgctcccccgatatccagcccgtcccaaagacgttgcccgagttgcgagacgatccggcctttcgggaattttccaaattgcaggaaagctttcaatggaatagtatgtctttgaaatttctatcgcaactagggcttgggtactaacaaaaatgcttcagtcgccatgcgcctagtatcctgtcttgaacaccttctcggccgagggagtaacgggacaaacgacatgctcattgtctgcacactggatttaatccaaggtgccctcctcctccaccgcggctcgcgctccctcttcgcccgcgaaatttacatgaacctcctccttgaccttctcgaccccatcaactgtccagcagtgcaatcagcaaccctactaacactcgtcaccgccctactggactgcccatcaaacacacgcacattcgagggcctcgatggcctcctcaccgtcacatcacttttcaaacaacgcgccacctcccgcgaagtcaagctcaagcttgtcgagttcctctacttttatctgatgcccgaggccttgacctcagcaccgatgtctccacaaggtctgcagcgcagccccagcaaacgcacctcagcgcgtagtccgcgctctgctgcggcagcagcgagtaaagtgagtcgtgatatacgtaccacggacgaaaagcagaatcttctagggaggtatctcaataacgtggaggacctcgtggaggatttgaaggagacggctccgttcggagcgacggtttactgaatgacctgactggcgatgattgactcactgcttgacgaccaatatgcgcgatgtccgctgcgatgacttggtgttcccttcctttttctctctctccatctcttttctctttactctttttccatcttcccttctccttatctttcgcccctcttcacgggcgtttacctcatgttccgtccggtacggcaattatgcgatcttctagactgatgcctcgtccccttttggcctgtcttttttgcctatttattcttcgcttcaatcctggaactttgtcgacctctactgtgcgctctcccggcttcgtttcctcgtcgtttcccttatgtctctttaatggcgacatgcatgtgtatgattattctccgtgattaagctgaactgtcaatatagtcctgatgaccaccaatatttcttcgtaattctacttctcaatgtaggcttcaacttgtaacctcggtttcgggctatctccggttatctttcctatctttctatctccattatagcctggatttatttcatataaatgagtcatcatatatgagtcaatgtagcacggactttaataaccaactatatagttatatacttcaagttcgacgttcgaagtggatcaagtccagtattaccgtggatcgcaagttcgatatatccccgctaacccaccgagatcgagaatcgttccacggtacaccttagccttcaaaatggagacaatccaggagttgctagcggcaaagccgtgcggaaacccaaagcagacgcagtacgtcgacacggtcgaagcatacgataaatgggcagaggtgtgtatatatatcctctttgccataatatatatacagcattcatataaccatttaaactgtatccactatctatcaaaataccaaaactaatacaaaacaggtctacgacacagacggcaacttcctccaacgcctcgacacaatcgagatgcgctccctactaccccaattcatcgaccgggtaagcaagcgcttccagccaacagataccgagaccgaaacaacccgccctagcctagtagatctaggctgcggcaccggccgcaacacaatccagctcctgaccgcgcttagcacagccaataaagccacctccttctcggtaatcggactggatgcctcgcgcgggatgctagacgtagcgcggacggcgacaggccagtatgcggcggaaaatgcagcacagacgcacgttgagcttgggatccttgaccttcttcagcctgaggtatcgaggacacagcttccggcttcgttgtatgcacccggtgctgtgggggtcatatctacgctggtgctggagcatattccgcttgggcggttttttgcggctgcggcggggattatgaggtccggggcgtatttgcttgtgacgaatatgcatgcggagatggggatgcggagtcaggccgggtttacggatgagaggggggtgaaggtccggcctacgagttattgtcatgctattcctgatgttttggatgcagctagggaggctgggtttgaggttgtggaggttgttggagcgggtgcggatggggtggttgttaggggggttgatgatcaattgacggatgctctgggggcgagggcgaagaagtgggttggggtgagggtttggtttggggtttgttttgttaagacgggatgagatggaaagtagatcaacggagatatcattttatctagataatgacttcgaatccaacgccatgagttgctgttatacacttagaagaatttcagtagtctgtcgcggtgttgtacaaggttgggatgctctttgagcagttgtgctagccggttccgtttccagcctagggtatcatccaagatcagctgcgtgtaggcaaagacgctggcatcaaagaggcccgggtttggccggccgaagaagtgctcatccttgccgagcaaggtggatagcgcctcaaatgcgccacccgcatcgccttccagggcagcggcgtcgatgtagcgcgatgtcttgaggagctcatcgcgggcggcctgttgtagctggtggcctagggctgcgcgcacgatcgagtttgaggttgttggatttacgtagagtcggcgtgcgacggcgttgaagttctcactgtctaggtaaagcatgtataactagacacgtcgttagctccgagtctagggttcgtttcatatggaattatcggcctacccaagcgctgcgtatccggttgtccaaaagcgaggcataaacctcgaaccgcaggttcaattgctgttcctcctcgcagtggacttgttcaatggcccatttttggatcttgtgtgaagggatcgggtttgaggcgtccgcaggcagcgaggggaggaggaaaggtagggagccattcggcgacgcatgattgttggacgaggtgatctcaaagtcaattccaacgaatttcaagtatgcctagtgcgagaccgatcagtgtggttccgacagggacagctacacgcacccttgcatgcgagtatagacggcacgaacctgccatttgagacattgaggattgaatgaaggccggccatgttgtacaccagatgcgtcggcgaaaacgtatagctggttgatattctcgtgtcgcggtcgaaggcgttgaggaatctcgttggccggataggtaatcaacgggaacttgtcgaagaggcgcctgataggagcagggactgtaaagaatggactggcattggactcttctggagggctatcggggcctttgggcggcattgtggtggtctgaaatccaaagtcgccaaagtccaagtccgaaagtccaaaagtgtccaagtgccgtcatcgaaacaattccgacgcgccaaacccgaacaggaaggtattgccttacctaatgatggccaggtaccgtcctccccgcaccttttctgacttttttttcgtttgtacttgggaaaagccggaacttacgatctataacctattcggatcatatagattcgatatcctagtgcttattctattactcgtggtgttggtgcgatcacatcagccccggtctctcccgcttcaccgttgaagaaaccaaacctccacttcgctccgtctagactccaccttttattctgatctgctcacgcgaacaactttgacaataccggcatacatatggcttagttcgtcaccaaatacgaggcgtctgacggtcctagcggaaacgggcgattgtatgcgcggggtatcgactagcggttggggttctgcgacacacggttgcgacattacgaatcaatcttgcgtctcaccttaattcgacggaatcatacatattccttcgccaacatgcctctcgacgaagaaggtgccaagtggtcctggtaggaatatctcgtacattgtcaatgaaaccgggctaaaccgttactccagtgaaccatgcattcgaggtcaccgatcgtcaaaatgccagcacttcgatagactcatgatgaaggtccctaaagctggccgacctcttgcaaaatgcccccacccgaagggaacctgcagctgccagaagtcatatgccgtgatggtccgcattccgaaaggtaaggatatatttgtcaacccactacacatgtgtttgcgtcgtactgacttgcctaggctcatcatgtctatgtcgtccgctatataaagttcctatggataccaacgagtcaacccagtctcccccaccatctatggtttccacttcgtcacctgcgccgggcaaggtccagaagtctggaagaagacaaagtactatgcaagcagcacctgaaaacatagctcgggcgttacaaaatatgccagacaaggttaagctcgaggatggaacatcgaacttgacttcagacttctcttcacaggtcgggttagatggtgcacacatatcttctactacacaaaaccgaagtacgccaacgcccacagaaacttccaggcaagactcgcagtctccccaagtatcaagctgctgctctcaaaaacaaaagccaaaggcaccaaccccgaccccagctcctactgcggctgctgctcctgctcagaatggtggatcttgctgtggagggtctcgccctcctacgacaaatcaagctgtctacccagaggccgaccaatcgcaatttcagccgcctattgcttgggacgatcagagttatatgcaattcccaatgcctcaaatgtcgccctggcagaattcctcgatacccacgcacgaagactacatgcattccgccatgcatcaagtacatccccaacacccaagcctccataatgggtacatgggaatggtgctgccacactctcagccccaaattccccagatagggatgtcactcggtgtgactgcaccgccgtccatggcgtactccaacgagatgaacggtcttggaattacgcaagcctctatgagtccatacatgctcaacaacctcgagccttcctacaacgccccaccaggcggcgactcttgtcatgactgtagctgtggagaagattgtcagtgtcttggctgcgctgctcatccattcaataccacaacacgaaaacatgtccaagagatgggtgccatgatcacctccaacggagatgacaagaacccagaagtcatcaacccttaccaaacctcaccttaccagggaggcaccccttcgacctcgttcccttacttcattcaaagcaccccttcaatggaccatggcttccagccgattccatttgatagctactcagacccaaactctaccttagccagcggttactcctcccctctatccgcaaaccaccatctaaaccagcagttaatgcatccttcggagtattacaccctggaatacccagtcggcctaccaagcgcctgttctgacatgacggggagctgccaatgcggtagcgactgtagctgtgtcggctgtctcacacacagcggccacaacggtctttccctggatatccctatccccgagcaccccattcccgacacagaggacaagcaaactcaacactcgcgccatgtttcccgcacaagttccgctacgtctcgatcttcgcggatcccgatattagacaatgtgtctgtgccctgccttagtccgcgcactttggagacttctaggatctagatgatctacgtcttgatgattattaccattttctttctctactcattttttcccctgcgccgtttttgatcttacatgatttatgatctctcatgataccctatctagaatctctgctctagacggccacaataatagattgactgtttgaatgtttgttgagtagaattcataccactatttctgctattgtcttttttcttgccttctgtaatgttttttttttcatccgtagaaccagacagggcatgtattggcgtataaactagagacaccccgctaccccgggaccacttttccttaccctaataagccctacagactgggacatagtatattttgctaatatcttctaatatcctatttgaaaacaatatgatgagcatcaatgcattgggggatatcataattcttaagcaaaaggtaatatacagattaaagacagttactcacaaaaccccagtcaacccttattccactttccgaacttcacatagtcatcatagagcgacttgaacactgcacggccagagacatccaacgcagcgttaagcgcacgcatagactcacgcgacatgacatccagagccgcataaagaccaggcaagatagcggccttgacatctggagacagcgacccacgcagcgagcactgcgcatactccataacaacatactgcaagtactggccggcaatacgcttcgccttcttcgtctgatcagtcagggcctcgcgggatgcgccaggctggggacggaggacggccgagacggtagggtcgcacagcgaggtcaacagacgggtgtaataggtagcgtgcgaagcgtcgagcggggcgagccagaagggctgtgagagggtgggctggaagcgggagcggccgcgtttgcgggaccgcgcgaagagacagcctagtaggcgctgcatggcgtttactactaggtggaagcggccgccgatcttgaggcgttgcaggctgagtacgacgcccattagtcggcacaggcgggtgtagatggttggtgcgtaggctggggagatcttggggccgattttggaggaggcgctggcgattgcgctgagaatgctgtcgatgttgcattgggtgagactgcgggtgtggctgcggagaaggaggtccaggcattccgatgcgaagcagaattggtcgatgcttgtgctttggatgatggtttcggcgagggatgtgcagaggagggagatctcgcgtgatgtggcgctctctttgtcttcgacgggagagagcgaggaaacggcgaggtagagcacgagtagtctgtagctggcgttttcgccaatcaagccaagtccgcgaacttcgcagatcgtctgggtgattttttctacgggcattgagcggaagcgttcagtggtggtccggataaagagttgctggtcctcggcatagagagactgaagagcaagcgtctcggcgcattgtaagactggctgagcgatgttctcttcgggtcccttgcaggcaagaagacgtcgtcggatcaaccgagagggttccgagtcaacggtcaattccatgtaattgtcgatcttggaaagaaacttctccacttcgacgttgttggtggctagatcttcgaaatcctctagagcatcgatggtcttgataatagtaattgtttcctccaacttctgcttcctgcactggtctttgacatgtttcatgtcagccaacacaaagtcaaacactttttggcgacaagcggcaagttccttctccgagaaggctgtctgcagctgctcgcgatgaacccagagctctgacaaggtcaacctcagaaggtaacaggccatggaatcacgatccacctgctccattttagctgtttgcttcgatgcccgggcgaagagcttcttgaacatcttgttccggtcattctcagatgaaaccaggagctttgccgatatcgcgtggtgcaggcttcggaatgctttcatgatctggaggtcgaggtcggtaccctctaatggtacggctcgagcagcagtccagatgggctcccagtcactggtcagtgtggcatcacacttaggcatggcagccaatttcgccatcatcgtaattattccaattgtgacttccggagaactgtcctgttcaagtagaacattttgcaacttattcaagatggtggttctcagtccccgggtgatcaacggggctggaaccctctgcaagctcttgacaagcagtttacgattgagcggatcttgctcgatgctctcgttgagaagaagggaaagatcagagacaatgaagggagcgttgagcatgtattcatgacagaccacactcgcccatgcctgaaggaaccttgcttcttccgaaacagcctccaagggaaacgacgacgaatggtattgagcagctgccagggacaggatatgacggaatagacgggatcgatcctcagaagatataagagcccagacttctggaactctgacaagggctaggaaataagctagaccaagggttgtttgggaattcacagtctctgtgcggccattccatggcgccttcatcgacttcttggcatccttggttgagatggaggtgatgaggtctatgacatccttggtggctttgacgaatgagcctagctgctcatccctggcgtgtgccttggttgcagcaatcaggaaccggtaagcctcccacgattccagaggagcgagttgagctttggttaggtccttgtggttgcggtgcacagtcttagcggcgacttctaccaacggcataattgtacctgccatggtattatcggctgactgcagggtgttctccaggaaattccgaaccaaccgccacagacgccatcgccagtgcagagcctgcttcgacgacagagtagagcttatggtttctaggagagattctaatgtcttttccgattccgggaacgtcgagactcggccacggaaacttgcctcgacaagaacaaacttagcataagactgaggggtgtcagcgactttgccattttcagctcgcgtctcgctagcagcggtgcgcatctgggcagcaacatgcgtctcagtgagcgaagtccgcatcagctccgagtaagcatccgccaactcatcatcttcccaaaccgagaataaactcagattgctgttatcttggcgagcctcatccacaataaggatttgattgtgccacaattccatgaagctgggcaggtctcttgcggcagcgaaacctcgtaacaacggcagcacaaccttgctcttgattatgtcgtagtccctccgtttccgggaaccactctcgcgccattgtaacaggaccttgtcgagcaatgcgtcaagaagcttacgcgaatcacgtaaaccggagtttggcaggaaaatatcaaccccaagactgataaacagagccgtcacattccactggaccttctcaagaccttgttcgaaaagacctgtgtaattggcatgcgccagaatggtgtgaagagaaagaccgacctttcggtcgagagcgacctggaggaggtgctccaataccgagatgaacttggaagagaaggtagcgaagtcttcctcctttgctgtagaaaacgctagctctgcaacagcgacgaataaagtctccaaccacggcgcttcatgtgtctgcctccggaacacatctctaggaacagcacgcacggcgttgtcaaaaagctcaggaagaagttccactgatcgccaaggatgcatacaagcttcattggttgctttgttttccttggctacggcaaactcgcgaatgatcggcctgaaagtatcagttactggtttgaccgagctccagtcgggctcatcttgagaataatcgattccagagcctccacgctcaaagaatgctgcacgagcgggaagtaagacatgcagggcaataatgcgttcaaccgcatgtagcagattggctcgctcgtcggtgtcgagtttggcggaccgcaggcaaatctggagcctgagcgcgtgggcgaagcaatgtctcgcgaagaattcattactggacttgttgtccatatcatcttcacggtaagaccttgattcccacagctccaccaccgagggaaacacgtatagcaagtgctgaagatcggttgttttcccctcatgcgagaactgcttggcggccacggcggctacccggaatgctcgacccagcagcatggcgacggcctcgggctcgcctctcagcgcaagcttcaaatgagagtttgccacgccatcagtgcctagtgtgcgctgtgcaagtgtcacaaatccgtggagacaatccaaggcgcggatgaaggcaaggaagcatgctgcggggttctgacgctgctcgtccacgtccacgtccatggcgtctgcatcattctcagttgtcattctcttgcgttttttcccttggcttcctcggcgatcatcgcgtgtcggggatgcagacagtgtgtgactagactcggagtcagagctaagggttgctcccagaccagaaaatatatcggcctccaaatcttcgagtgtatcgcatagaatcgataaaaatttctgatctctaagaatagcagcgatattcttcggcgaaatcaggttgatgagctgtcgtaatagaaggaacgaagccgcgtccactctatagtttttcccacttctcaacctctttaatagccatcgcagaacccattcctccttcggggtagcgtttgtttgaattcgaacatctcgatgaacttccgggtgactttcacatagtgtcaaatccacaccgatgatctgtgccgcttcgtgaatctgagtcgttggactggcggtgcccttctcaaggcggaggagcgcctcttgcgatgagcgcggacgctgtgggtgcgcaacacattagatcccggagaaagacgtgtatcattcgaaggtcacatttgacttacctccgcaatcaacggcatctcgaaaaaagcaaattattcgagagagtgggtatttatttgtcgaggaagagaaaaaaaaacgaagaccaaaaagaaaaaccgcatattgctccgaccgcctttggccgagtcgactcggtccgctaaacctcccaaactccttgcactccacacgcctccattcacctctataattccacataattgcaactggttcgtgttttaccctcggaattcactccggctcaattgatgcttatttctgcaccgatagatttatcgcaatggctgaatccagtgaatccgggccgatcgcgcgagccaccaagcccgtcagcgaagctttgcttaacgagaaggtatgagctagctgggatcttcaaatggggaagttgcaatatagaatcataccattgatatatatgacaattgtctcggtctggaaggaaacatgggagaacccgttggctaaccttttaacgtcatataattagtgggaccgcgccatctcctctgtgatcatcaagtcctccctcggtctgtctttcggtgttgtcttctcggtgctgctcttcaagcggaaggcttggcccgcgtggattggtctcggcttcggtgccggacgtgcttgggaagaggctgatggtacgttcatctctctaattcattcggttcacgggcatttagaggggcatttagtgaagttggagcttcgggtcactataagataagcacacttgagcttgggcagaggctgtatgctgtaattttttcagcatcgagcttcgtaggcccttcaacagtgacccgactatccgcttttctccgagcctacctatctccaagatctaagaatgactgagctaacttgtacttagcctccttccgccgtggtgactcccctatcagagatgccctccgccgttaaagaatagctgtcaagtgtgtatgatacattgtacagaaggcaagaggccatcaatgaatggttgcttcttggcccagagaagaattggtataccggttcaacatcaacaccgaacgaggtgtttcctagatttttcccccgtcttttgaattcagaaaaatgattgaattgaaaacatctcctggcacttcacttccatagcatagagaagacgtacttttatcggtctcatttggcctttttggtctaccagaacgaggcttcgacaagccagaatgccattcgtgcgctttgttgattatagcagattgtagaaagagaaatccatggatatctctggtgaattcgcctgtaaccccattggacatacggagtatgttgtagatgaattccattagcgccaaaaaatctttagaacccgtgggcacacaagatataaacacattaccaaatactgtcatctactggaggacaaccatggcaatatgacaccgttcatgaaaaagaaactgaggttcaagatgccaggcagaggttcccggtaattaacatcacgtgtgtggacgtctagatagtttatcattggaccgctggaatatagttatactattgcccctatattaacttgcttgccccgaggattttgttcaagctacaacaatgactgcgtgtctaagatgatgctttgaccggagtaaagcacacttttcgtggaagctcgtttgaagcggaatacacttttcgtacctgcgttcaaatcgttatcaaaggataatctatctctattcttgcccgaacaaacaagataggatggatcccttcagccgactcccttggtttgctctgcaaaatgtcctgtccgctctgccagatctaccgtcgctccacagactacacaacacatccacggaagtcgcaaccttcctgcaccaaaacaatgacctattcgcccggattgtggatgccataatcgaaaacacggcccacgaaagaagcctgttcccggttgtgcagcgtgatgtacggcaactggtgatcatctgggctgagcagtcaagaaggcggcaacagcagccaactgaacagaacgaacagcaagaaacagccggaaacccgagtgtcctcgacaacctgcgataccttgcgagacatggtttcggccgcctaacaccgaatttagggagcatatcaccgtcgacgccagcagctgttctgtgtcggctgctcgcgctaatgtcccggttgcgctgcctcgtgcatgcgtcattccacgcactggttgcgaagtccctccagctccggatcgagcacttaccgaagaaaagtttatatatcaatacacgcaggcttgggcccagccatcgtccgcaggggatcccttatacgccggttgatgttggtccaatgatgtgggttgaagagcagcgcctgctcgagagctttttctgtattgccatcttctacgaactgcgcaagatgtatgcgaatttctccgtggtctcgatgcgatcagaaaccttccagatttcgtcgcacgatacggtcgaggacttttggaagaaagtctttcagggcgagaagggtggccagctggagcagatcgccacgactctttcctggttagatggtcaggccggacgacgtgaaaacgtgtactcatggctggcctccggaccggtttcaacggaatacctttcttactacccatgttatacaccgttgaatgatgagcaatgggaggacgaaaagacctatatacatgactatcattcctcgcatggtgcaatgtctttgagtgcagctcgatgttctttaacttcgccgctgcgatgcgtggattatgcggcctttcgcccgtacggtctgatcttctggagtgccactcggatggacgctttgggatttcggctggtgtttgggattggccaccatatgtggtttgcactgtcctttgtcctcacggataaggattgggaagacctagtcgcacggcagctggatcggagcttcaacccgatcacaatgtaaattttgagataatcaatccggaaccttggtttgctcaattcaattgctaacttgaatctactattctacatgggtcggcaattatgaacttatttaccctgccactgcttgtctggcgtctagataggagaaacaatactggggaattgacccgaggtaaagaagccttacatggttctttccgttgttcgatccggccttcatatcatgcgccattttcgcgcatcagaactcgttcgaattgaatcgctctgtcgccagcttcttgtaggctgttcttgggcggcgccgagggcgcaggcgtacttgcctattatggtggtgatgcttagagcagatacctacttatgttaccttcttaaagaaggaacctacacgcttatcagttgcaccagcttctagttgaaacaaaagcagagactggacagcctccgaacttttaagaatgatagacacacatacatcacacaatgtcaataaataggagtgataggtgtactctttatacttcctctaggcaaataagtttatcctttaagtagagatagctcgtaaaaatggtagtgagcctattttggggacagaaataactcctttccaggcccgcggctttactacatagccagggcccctaacagctagagctcctggcaaagattgatttttttgaaaagtgtatttaataccctcggaaataactgattactccgagccattgaccggtatattatcaacctaggtcacagaacaagagaaagtagcgaatgaaaaaatgaagtaaattgagcaaaaaaaaaaagagagagaaagttcaaggtagctcgcagtttattcggcttttccttttccttttccaggcggaggacgcaaattctcttcaacggcccgaactggaacttcaagacgcctgggcatcagggaagggccaagagtgacacctatgaagtccaaatgggtcaccatggtccaaagcgcccaagcttcccatgacatccccataacaaggaaaatggattcatcagtctcgtacgcgtccgaaatctccactttcatattgggcggtagatcttggatcgctttttggaagccttgtaggacgtcgctatgacctgatatgtggctgtgaccatgcaaagtcagtttgacaagtacatgtttctcatttgcatgcgaggaaaggtgaggaatgcgcgaggggatagtgtagttcttgaacacaagtctgatcggctgagtaccgctaatagtttccatcacagcatttggagcatggggcggtttctgtctttgaatttcttgaaataaggcggctgtggtcacacttgattggcctttgaagtgctgaactgcacggaatagtcgcatagtaaatgacactgtctgagctcgaggatttgttccctcattggcaccacaggccgccagcatttggatcgttcttgtctgctgcgctcttgtcgcagcaccagagtaacaacaatcaagtaccccgagtacatcgacgtatttcatagcatccggttcgtcccaaaagtttgcacgaatgcgggaccatggcatagacctcttgccggagacaaaagacagacgcccgtcagatatcattccatgcccgacgtagtagaatacgaataaggaatgccgtttggaacgatgacagtcatacatgacttcgcggatcttgccttgaagattccaacttggtatcgtatctgatgatttcacaatgtactcggtatactggatgccgaaggtttccatcactttgcccatagtggtgatgtctttgtctgcgccagtattgtcatcttcccatcgtacaaggattgccactttcagatcgtggacattgccacgagctgctgataccttttttaggtctgctttcagggctgggaggtggtgaaccagaggtgttctcgaagggaatgatgtcgtagtggatgagaatgaaaccggggcagaatggtgagacgtggtgggcgataccggatcagacggctcggccattgtgctaagcgatgttagtccagagtacggattggttcacgcttagtactcacgttgtgaaaggtgggaaagaattgatgctgagtgtgacagtctgagcgacgacggtggagaaaagagggaaaggacaagtttcaagtaggataaactgaagcgttagcaggtgtaaagaagagagttgaaaagtcttgtaaagtatgtagataggtgtagatgtgtgaagagaggaagacagagactcaaggcgactgctgtttatatagtcggccttgaaccatagattagacgcccgtgtcccaaaagtgaagtgaaccacctttctatacctatttagagaatcacttgatttatcaaagtaaagcagtttaaattagcaagaatagcagtcttgttagctgttctcttagatgtctttatcaactatatatacaaaacacgcgtctacttaaagagacttcagttttatctaatttatttctattattcctcggggttttcatctgatatttcataggtcaatacttgcatgcattaagagtgtatgagctcttagcgagagtgtgattatgaatacttaattgttcagagatatcgaggttcctagatcttattattagtagaatgaatgaatgtctgactcataaaccccggagaagatccatctctagaagccaaggaactaggaagcagtcaaatattatcatgtcatcgtaaatttattcgcagatagggaattaattatataaattcaagcgcgctcgacagcaacagcagcagtgaaaacaaatatcaaaagaagatgccgtccataaacaaaaactcaagtccgctctcaaagcttcctgtccgaagtattcggacctttccgatcatccaacccaagcgcatcatcaaacgacctccgctcagcataaccatgagcctccatgtcattggggtcctttccgtatgaaacggagagatcctcagcatcgatgtcaacctcgttccaggtagcacttgtctcagggacggggaagaaccacgtcagagcgaagtacacgccaccggaaacaatggacccggtgaaatagttgatgttgtagatgtattccgcgccgatgggaacctcgcgccccacggcaccggcgaagccaacgatattaatcaggataccgcaaatgtatgcggtataggcacgccaggagaagccgccgttgtaatagtagcagtctgttttgctcgcgctgtagagagatttgacgttcaagaagcccttgcggacgatgtagtagtcgcagatcatgacgccggcgatggcggagaggaagagggaatatgctgagaggtaggttgtgaagttgtttgaggtcgagagcaggttccactgtggattttgttagttttggtcatgtcatatgtggggattgaataaacaagtggaagaacgtactggacacatagcgaggccgacaatggcgcagatgtaactacctcgtcggatgctcatgtatcggggtagcagtgcagtcagatcagtacctgccgagatcgagttggcggaaatgtttgttccgagctgagctagagcaaatccggtggcgatgacgaagataccgaagcgctggccggaactggctccatcaaggaattttgcgaggagatcaaggggattccatgtgtagccgtcgttgaagatcaccgatgaggaggaagacacgatgattccaatgaatgaggtgacgccaaagccgaccggaatagtaaatagctgggcccaaattgcatcctttggtgttttcgcaaatcgtgagaaatcggggttgttcatgataagtgccgcgaagtttccgatgcacgacatgattcctttcaccatcgcccatgaaagatcgcttccgtggacggtgttagacttgtggataatcgggccgagaccgtgagcacgggaaatggcccaggcaaagaaagagatggcagcgatgggagagtagatcgccttagcggtgaataggtgacggactttgtgaacggggaaccacaaggctggaagcgagaccagccagaacaagaagaagctgaggaagttcttggtgtcgacgccagcactggcagagagaccattgtgaaggttccggtagctgggccagatggcctcgatcatgacagtcacacactgacctagtaatgtataagtacgcgtgttttcaccggattggaaagatacatacctccgatataactctgcacgccataccaaatgatagccatcaccacgcggttaaggacgggccataaagaaccccatattccgaatgaagctcgagctgtgacgggaaaagaaatgtgatagacagcgccaattcgtccagtcaggcacacgaagcctgcagccacgaaatatccaacccagacacagatccaggactgccaccaggaaagaccgtcgacaatcatcgaggaggaaatcatccatgtgttctatatcttgtgttagatgccaccaggcttcaaccgggcaccattttgagatactgacaatattaagcgagtctgcaatccagaaagcaacaaaattgatccatctccattgacgtcgttcagggtccactgtattgtttccataaattagttttgcattctttgtggaccacgatgaagggaggatctgagatcctagaatggtgagtctcacctggtcgtagatcactgttggtcaacatcatctgggcattggtgagtccctgctcgtgctctacggccagcttgtcgagtatccatttgaactggcccatgttggcgggtggacgtgtagtcttggacgtataggcttgttgctaatagttgccagtagagtgacgtagtcgaccgaccaaatgaagtgataatgcaaatgtatcgcggaggagttgaacaaaagacgaagcttgaagcagggattataatggggacatcagtgtcactttatacaattacccacgtggaatgactctggggcgaccctgtctccatcgtgaatcctcgtttccccgagtgagataagaaattcgttgtctgagtgtctctagttttggaagcatcgacgatgatcggagccagtatgggcctatcatggccgcttacggacagtgaacgaatgagttcaagtaagacttcccgacgttatctgcaaggatttgccggaaaattcgcaaccttgcaatgttgggtccacttgtctccatatcaaaaatggtatcagagacggtgattggtggaccctaatctatacattgatatggagaaaacctggagatagaaagatcttggcgttgactcgatgagatcgagtaataagataggtcacgtgtataatgcctcaggccagattccacgcctcaggccaggtatcacgtaagcgtctcacttgggatgtcagtgcgaaaaaaaaaaaagaaatatacaacatatgtaccagatacgcttacttatattactatatctcatgtgaggcgaaagaaagtaaagataaataatatgttcgcatacatactacagtatatggagataaacagaagtggcatgcgagtgtgcaatagtgtataattgaattcacagatcaactgtgaaacgagcctcctgaaaaaaaatcccaagtccctatgcaatgatgataaacaatatgatgaaagagaagatttgctccagtgaaccagtcacgtgtatactctccgatgtggccgactccctcaaatgcgatgatgatgatgatgatgatgatgatgatgatgatgaataacacagaaccgagttcccgaaaaatcctatgtggacacataagaaataagataaaaatgaaacacatacatgaggcgaaacaaataagaaaagatgggacgaacgagaatacaaacaaacacatctcccagtcggatacatggccggatgatcagtttctggatttgtcgcagacaaataacaggacaaggacaatgaacaagataatacccatggtaaatggcaaaaataaaactcgaagcaacttggggggtatcgctgtgacgggtatggatggcaatggtgtgataaacccgacaatgtaggcaggcacagatgaaagcaaagagtgggatatgatagaatagacaaacgccggaaccttggttgatgctgacatggataggaatacaattccagatcgggagagggatgggaggaaagaccagcacaaaaatgcagtggtcgtggtaggagtgggcgaggaaagataagatgtgactctcattgcacgaatgatgagttcgacgttgttgacacagtgggtgtcaggttaggagagctttccttgtcctcggggcttggagaatcactgcgatcatgggcttgatccctttcgcgctcggccgatgaggagcgcttgaagacggtctggccgatttggcgtagaaggcccatgcgctcagcgcggagctcttctaggtccagacgctgaacggagatgggatcttgcttggagatcttgcagaaaagggtcgagaacaagtactggtcgccgctggcatcgtagaggggcaagtagcgataaccttgcgagagactggtgagcttggcagtaaaagtcgccagctgcacactgttgttattgcctgcactgcggccgtccattgagctccagacagtccatcgcacaaagacaagatcgggatatttagtttccagcgagagcttgaacttgtcattgaaaacggggctgtagccattgctttgctcgatcttggtgcggcggcgatgtggatatccgataccggacatgccgttgcgcccggaagcatccataccgccttcgccgaggacgaagctttgaccacgatcatcagcactgaacatctcaatctcaacgtaagggttgatgctgtcgtcctgtccgatggtgcgtggacgggggagttgttgtgcggaaacaacgtcaactgagaatcgaaccagtttgcgctccatcttgcgcttctgatttccatcaacagccgggaggcgaaggctctcaggcttgaggatgtagccggtacgatcagtcccagcggcgaacatagcctggttcatttgcatgccgatgtcgtaagtttgccagttgagtgctaccatttgcacaccgcggcgccagaacttgttcggatcaaaattagatgaacgaagtcggaatccggaaggatacactcgcgtaaggtacttgcggttgtgtgcttctagtgcaactttgttgtcgtgactctgacagacactctcgaaggaccgctcagcaaacgagtatatatggttgtaccgtctgctctctggagacgagaagctgcgccatttgtagccgcgggtgtagacacccaagtcagaaagaggcttggtaatcttgcttttctggcgccgctttttctttttgtcagtgtgaacagacactagagctccgtcactgtcttcagttgcactgctcatgctcgtggcagtaagcgagcgcctatcctgcaagatcaaagggccaacgctgtcgacgggacccattgtaggaggactcgagagcgagggaagagctagcgtgctcgtctcattgagcgtcggtcgcacaaacggcgtactaacactgcgtttgcggccgtgggtgccgacggtgccggtattttggcggggatcaaactcattctcgtcacaggtcttgactttgaccagaacacgacccttgagctcttccggtgaagggaggatatagcagttggtcatcaagggctcgaggataagacgttccttgaatgtctccttcatgatcttgaccattgccagttgctgttccggattgcagtgcacctcaagagaaagaataagtgggaagtcgcatgtgataaaagcataccggttgatgacggtgatgcaatccgcaaagaggacactggtggtgagagtccgcccgtgagacactatggggcgtccatctgcaccatcccagcaatcgatctcgacacaacgacacccttgctgaagcgcgctaacgtaagcctcggtgcttgatgcaccagccacttggcggcccaggagataagtgttgtgagagctcgagatgaagtattcgttcaacggtcggtcgaatctcgactggggagcacgtgaagcgtagacaccgttgctggacgaggacaaaaatgcggcaaatgcatccaggttcatccgcgacacaggtggaggaaggtcggatccttctgcagaaggagtgcgagatttagaggccctccgaacgtacttgtcgaacagtgcagaccagtagatcctgtcggattcgatgtcttcattttgcacatcacgaaggaaagtcaagaactcttccagagtcatgccttctttcgattttgcggtatgaagcttgaagatatctttgacatcctttcgttccttcagacgcaaaaggaaatccttgaattcagaaaaatccaacctgccgttacaggcagcgtcagctttagtgaattgtgcccgaagcatgttcttggaacagttgatatgcaagctgcggcagaccttctccacggcagcgaggtcgagactttgctcctctactagagggaggccctgcgggaaaagtctcgacatctcgcgctgccagtgtgcctgcagaaccgcttcgctttggctcgaaccagccagaccagacatgagatcgattctgtaccgagagatatgctcaagagtggtgatccacaggtcaagaatacggtcgcttggagcgataagatgcaaggttttaaccgctcggcccttggagcgatcagaatccgcaatgacaatggtgaaccatcggcgctccaaatcttcggggatctgatgttcttcccggtaattgcgagcatcggcaccaacccggatttctttgatatcatcgatatagaagcgtttggctggattagagacatcccaaaaaaccttggcggcatctaagtcaaggaaaaagcggacttgctttctgtgtttcttggttaccttggtgaggactgtgcctcgctgcacagcagagtctaccttgggcgcaacggcaacggcgggaacgggaccagcctcgcgagccctattaatacgactcnnnnnnnnnnnnnnnnnnnnnnnnnnnnnnnnnnnnnnnnnnnnnnnnnnnnnnnnnnnnnnnnnnnnnnnnnnnnnnnnnnnnnnnagggggggagcgggcccacccgggggagccatattaatacgactctcgctgcgaagactggatgcctctgagccagcccatgcacccaggttgtccaaggtttcaccggtttcatcctcgttgcttgaatcaagggcgctgtctcggacaggttgggaaccggttttgctatcactgcgccggcgcatgataatgggaccagtgctccggtcccgcttctcgttttgggtggtagactgcctcctgcgagtcaatttgttggcggcgcctctcgagattcgtctcatgagacccggcgccttggacggagctgggtcattaaagctggaagggtttgcgtttccaggaacggccatgatagattcgccgaggtcgagggggcctggcgtaggcagggaagaaccgttcactcggccaaagaggggggtgccagcaggggttaaactatagggtgtgccgtgaccagggatggatgaggtaggagtacaggtcggagaagaggtgaaagctcgtgtggaagggggaggacgagatgtgacaacatggcggagagaagtcggttgagggagagatgtcgcaagctttaagttggattgggtgtcagcatccagagtcggcgaggtagtcgtagcataagccatgacgaatatcaaaacgacagctcagctgtcgatagaggaatccaagcctgtcgtataaagtgccaacgtccgagtcacctggactcagaaatggacgaataggtaacagcgtatgggaccggcctgctgtcaaggttcgcaaattttatgcgatcagagccaaaagagtattctgacacggcaaaaaatgatcgttcagccacgtcctcagcagaagttcaccgttcctgaactctgctgcatcttgggctggattaggtgtagtgcggagagccctgccggagagcagctcacggggggaaataaatcgcaacaaaagaagatatgagcgattaaaaaagtccctgataacaattgcaaagggcactggccctgtgcaacggccaatctcccacgagtgatattctcagccgatgctaaccactggggatagaacgtcacaaacgaaatcaaccagggaatggtttccagcctcgaggaagtggaacgtgagtactcgtcttgcttcttttggagcccggccgattctctgtatgtccttccaatgataccaatgctacccctctcttatgcgtgtcgatctgccggtgcgtgggggaagctgctgctctgcagtggaagcggggagtgctgtggtatggaccaattgatcgtggaatcaccgagtgaattgggcaaggcagcgcagaaccggttcgaaattgaagggcgtgcgccaaagcgagtcaaaggccgaatgtgatgcgtatgcaggtatccttgccagagttcagacaagagccccaagaaccggctttgggtgcttgcggaggtggacaggcggcagcaataaaaaagacccaagagtcaagggttctcctagtccgacagggttcgtggcgcaattggctgagatcggagactagcgatgcggcaggcgagggagtacccgtgctagagtgcagggagtctttttccccggcgcaacgaagctaggataggagaatgcgacgaaaatcggcacttgcgacgaagttgccaacgcagtggatgcaggcggtcgaaagaggaaaggagcaatccgagactgggccgagttagggagcttgctgatgctggattatttagtgccgttcgaggatcactgcaagctgaatgcgagtcgaggagtggataaatttgcggaagatcatgcgacgagagggagaagacctgcgttgtccttatcgtcgtatgagtatagagtttttccttctggtttcaaggaggggaggtaattgaagaagagttggggttgaagggggaaaaagcgaaaataattaaatccatgaatcccaaatccgcaaattgaagctgcggtgggtactgggtacttacgatagacgtagccggcggtatgcgaaatcgtgtaccggatacgtgtattgtccggtaaggataaaatactggtattctgtaacaatccgaagtatgtcgtaatttggatattcgacctctttcttcgttcttctttttctttttctgtgggagagtcaataaatattcaaggacatcggattcaagcggtaactgctgatattccagttgtgatggggataggaggaaaaatgtgtgtatggtctgattagggcaaatgtccaagactcacccagtgtagagatgaaccaatcagtaggaatgaggctgatatctcaaaagaaaaaaaaaagaaaagtaacaaagaattctctagagtgagaaggaggaaaaggagagggcctttgaattgattaaatactacaaccaggtgcaattgctcatccccttcaggcatgcccctacagttaggtactactttaatacccaagtgcctatcaaaatacagagctgcctaccatgagatgacgatgtggaatgattgctaggcggaaacccgttgcttggtgccattggacgatccttggaattcctgaggaatgctatcggccaaactgagccgatctgtgtttcaaatgtgttgccctgaagcgacgggaattacaatttccctacaatcaacctatgacagattctcctggatcttttgtgtgaaaaaggggattccccctttctcttcttcagaactcgtctttcataatcataaatgttccgtgacattatggattatagtggatacaagaatcactagcagtttatttctttcagatttatagtccgaggcaccgccgggctctatttcccccacattgcagcccagttagtcgactagtcgacttttaatataatcactttgaggtttttactctgtatctgttagaccataacaggcattctttacctgtattacttccgaggaaatttccgcttaataccgatagagcggtccggggaagatatgcggagccttcggattgctgcgttttgatctcgagattcaattagactttcctgttctccctgtgatacacggtcttatctagtgttgttgtttccttcaaggttgtgtttgtgttcattgttgactggtcaggccctatctgcacctaagccctgacacaaaaaaagagtgaagtcgatcacgacacatatcaccattttctcctattcaataccttggtgggggttaaaggtacggagtacaaggtatctacatcgccgaaacgtcgaaattaaatctcatccctgaaccggtgaggcttggtgtggcagtgaaaaaaccgtttaggcggtgcagaacgagtggattatccaacgtaaaaacagatcgtcggggagtttgaggtctctgtttttgtcatgaacactacctactccgtgtacgaggcccgcacttcccgcagcgtgattccatgctttcgtattttcagccccccttttttataccttagtctcagatcctccagcttggcttatacctgtcttgtcaagacacacacagttacacagactatacgatgcagagtgtgaccagccgcaatgcataggaacatctgcggggttcaccagcaaccccgcagccgttggaacttggtgagctggcgatgccgtgcttcaccctttccttgattttgcttcacaactctgtgccgctacagccggagaaaagaaaatcgaaatccctcagcacccctccataaaggctactcatgctactctgatcctgggctcctgcacgtcacccgggtgggctgttatggactttagcgttatccaaggacgataaccaacagcccccgacaaggatttggttcagaccttagggatatttcccctatggtaataagataatcgagtatctaggagccccgcgtacgctcacaacgtattcggaacgggcctctccttgtggattttatacgccgcaagatcggaaaaggcgacgggaaggtaaaattacctaaaaggggaaatagtcgtcactttttagttttctttttgctcgtgttgaatttcctttgtttttttttgtgggctgggaatacggtgctggaatgaaatgactcatatgccccagtatacacgcaacttcaaaactacatttttgagccgaatctattgctgaccgtgtctcctgtccaatatctgtgcgctatcgacgtgacatcgtgcagggcggttatggcgggttaaaagaataccctcggttccctgcgacagcacaacagcgaaatagattaaaacttgcagggagatcaaacccagttctgttattattggattatagaaagtagaccgccacgttgtctaagagaccattgcaaaagaccgaagagtcctgtctttgatccatattccattgtgcctcgtcagccctaatatagctaccccacctagtaatgaggtaaaaacaaagagcggtggctgaagcaaggatctgcgcgttcgttacagccactttttccgatgacagcgatgtgataatttctgtcggtcaaaacatcctgaccgctaatcacggtgctttagatgatccataatcaaagttgctagccagtcagcgatctccaccagaatccgactagggggttacagacgggatgaagaggggttgtttagcgaactccatttgcctacattatacatggactcgtgcatatgcacattattgtgaagaaccgtgctatcaggccatgcttgcacgaatgattcccagctctgacgtgagacatgcgacttatactaggctaatagcatgatggaggtgattcagattcagattacatatttttgtgtttcggtaactaggacttggtatgtacataggaaaacatgtcttactatttttgcttccaagatccttggggtcttccattggcttatggaatttgatgtccacttgacagggtcgttctcgtatagagtacaagctagtgtattttatatatgacatcgctcaggggaacgttctgtttctcaatacttccaatggttccttctggaaggtcaaaaatactggtacagtcaatatagtagtaacggtaatcgaacatagagtccacgtcattcttcttcatcttgacggagatacctatctacccgtggacttcttatatcgtcgagactcgagagtaatctgcaagatttgaatggcgtcatactgcctacagaggtattcagcctcctgcactccattttgatgtgcatgtaaacaatacataccagtcaatcttgcatccgctccttgctacgatcaacagccctaaataatgtccccccacttttgacggcgggctctccctatgggacgaaaccttcggcgaaaaaactctcttatgctctttgttccctttgtgattctgtggggagtgcttcgattgccgggattatttttgtaagatcgattggattaataggagaaataaaaaaacttatttctttcatatcaacactaatcttctcgtaaattccagaatatctatttaattggacgacctatactatttcaactcccaatcgttaattagttagtaaccttggaatgattgtggtgacatcatgaagacgcaacgagaaccaaatttctttcgttacggtattacgtgttttgatacgcgtacagtacgtaaaaagtcaggtacatcgaatgttccttgggaccttccgagtttggaaatcccagtatcacattacaacatacaacatacggagtatagcgcaagcttgtcgggatctgagaagctcggccttccaggggcactcgttttttcttgcttaaagaggcaaataaaaggaaaatttgagtactgagctatgggtctgatcttcaggagaacggaaggggctgaacatctccatttccatttctggagaatttaatatatattctccctttctgagtgccattactactatgatataactgtaacatttcaaatgtttagtttgggaaaccgcaatatatattccatctctgtactgtaacactcattcaaaatagagttacctagcacgatttagactactttcaagtattccaataacaatcttacatgctaacattgaattatacagacccagcggaatggaaccgttgcgcctcactggggtccttgctccatcaccttaagcctcgcgtacactttcttccccggttatatcatgcaagctgtgattgacttactcgaaacagccattcttcctctcgagatacctatcaggcatacaaacacccccgggaatacagccccggcgacgggctactcggccggatgtacatcttctttgggttataccaaacttggaagccagtcaaaagaagcaccccgctttgacgcatgcacgtcgacaggcctctaccttcgaaaatgacagtgcatgccagatactatccactagcttacccaaagaagaaagccatcacaggaactgacacgtctcagacatcccccactctcgtccctttcagcccagcctcgtcccgctcctccactccttcgatccgtgttcgatgcttccagtgatatatgcaaatcaagcgaggctgtgttgtacaacataggatcacgtataaccccacactaatacggaaatggaaaaaaataaacatgcaaaggaggccatttcaccatcctcgggcctctctctctttgatacgacaccccgggctacctctcgttggctcagaatcatcgcccccaatcaccgacccggctgttgctagatgctggagattgtctacccctcctggggcatttcgattccgactgcaggaaggcagatgtgtgtctctttccttttttttttttacctttttccgccttcctgccgtgcatgtgactcaacttggaatgaatgttcccatcatatccgaggatattggtgcaacagtatcatagggcgcccgtggttcgcacgtcactgattgtgtaaccataatcatgcattgcgactcgtcccggtcctattcgaaatgatatccttgtttcagaggaaactatcccggaaccggcatggtgccatcactcgtctcacggctgatctgttcgactttcttacgttgtacctttacgacggtgcctttttttttcattgccggtgcggattccggattcaactccatcccatgtctgtatgaggcacggcttacggatttcgtgcacggtgtcgggcgttttgaatgctcgtttcataggcggcgtgcgatcatacgattagggagatcgcatacgtggccatgagtcggataccaagggaagtacacatatgtttcttgaagcttgcaatacttcacgcgacgtatcgtatacctcagacaaagcgggagagcgggagagcgggaaaggaaacatcaagagattgcaacaacccataagcacggagtactccgtagaatccgggacaatgtctcacagtccactcatctttgattacccgtcgtgttggatatcgtggctgaatatctatcgccgacagatattgcggacccatatctcggaatgacacccggctccaagcggctccggctcttagaaaaacaactccccactatactaacctgatctcagtctcgcgattggtgcaagtcgattatggcttggatagcagagacctctgggcagcaggctgacgccattctgaagcagtggtatcagccccagtggggcaagcaagaccaggaaaatatcaccggaaacgccgtcgagccaatgtgccagcttccaaagccagcttagctgctgttagctcaacaaatccgacatcccgcagctacctcaatctaatttatccgaagcactcatttcctctaccagttctaccacacatccccacacatccatccaccaagcaaattcgcattttaccatataccaaacatccgggacacaaagcattcgccagacgtctagcggtttatacatgtcacagatctgagccttcccatatcccagaacctgaaatcttgaaacggaccccacactcagctcctgtgggacaacgtggcttccagaattttcatcgaaggttgtccagcccaccccgggaaatttagtaaaggatcagggtcaaaccccgacatgtcaggatctaattaagatgacttcgaacacgagctgttccttcccttcgccatctttgaggtctattactgacagaatcatgccacgggtcgcccgggagccaatgtcagcgaatttggtccgcaggtcttggcggtttgacattgaacctctagcgctacccgggacgacgacggtggctggcggataggcgtatcgaaacctgttgcagctgtgggtcctttgcgggttctgttgctgtcgcaacgagtagtattatgtcccgtaatatggaattcgtacgggatccctccgtgtacagagtacagtatagggctatagttggtatttggcggtttcttgtgggttttaaatgctgtcgtctattctggggagcagctcggggtagtgtcgaatgaatgtattgcttgcattcagcctcctcttaattttggcgcatgagctacaaagaagtacatacctgtgaaccatggggtcggtcaggtgactttgggtcgacctcttactagaacgaatcattatcttcccccaagctttcagtgctcacgaaatgagtcattccactttagttagctagttaactagttacctaagactcaagagtaagacccgacggtgacagtacctaataaattacaacatgatacatcgctaaattatctgcttgcttcaaagtatgcattgaaatcctttgtaatgcatactgtgggcgacgtcaatcaagtttcataagttacaatataacagatccctggaaggaacgatggagcgttcttgcccgtattggagggaaacgctccttccaatgggtcaagaaacaagtgacgtggagaaggaaggatgttcacggaggacttcctggagtatatacgaccacgatagcgagtagtagcgctatataaagtagtttctcgggcagttccctcgtagaaagcgcacgatggtagataaaccagtattaactcaggcgcttgcagttaggtcataaccccctgcccctaatactcctgatgtacagctgctctatctccgactgggacggtgaaagccgctgaatatttagatgtttatctaggaattgaaatgtcttctgtactgacaacccaatagctccaatcttagcctggagccctccttcttctggggatcgaccaatccacatctctcgtcggttatccccgagatgctcgagggcgttgaacacgcggagggtctcctcgtgctcgaggtacagcgactgcgtagcgccggatacgagcacgggacattttacatcatctaggcgactcgaaccgtccggtcggcggagagtaaatttcatcatctcaaccaaggtatccgtcggtgtcttcaccccgaagaaccagatggccaatccaatttcccaccgggcctggaacgaactggccatggccatggccatcatgctgttgatcagctgcgtggggatccagccattgttccagccgtcgaggagcatcggagagatatggttgcggacgaaatcccacatgtcgtagaagggatcaatagagacgcaggcatggatgcgggggtctgccgccgcgcgtaacgcatagtatccgcccatggaagcgccggccactgccacgtgggagagatttagttccagctcgggatactcttcgacaaaccgctcgaggaagtccaacacccggccgacgaccaattcccagtcgggacgcatggcggtcttatcccgtcggagcatgatcccctgcccaggcccttcgaatgtgagcaccgcgtagcctagattcggcccactggccgcatagacatagtagagctcctcttggatggagtccgccccgcccagactgatcaacagtggtaccgactccttcagtcgcttcgacgcgggcgggagataaaggtatccgggtaggggatacggttcgaaggggatactgaccgcaaacgccgggccgttgcctaatggaagcgcctgcgcaaatgtttcgatcaccttgagggctagagggagtacccgaagatccggcgtatttggcgcatcgtggaacatgtacccgcttgcgcggtagtagttggatgcgcgcaggaatgcccgccgtgccgaaaccctgtccccggtgcgcatggcctcatcgcccagggcccgggctttgtttgcctgtgctagccacgcgcgatgccagctttcggggttgtcgttggcgatatcactggccgccacgaggcattccccgatctcggcgccgccatagggggcggcggagagaatccggataaactcgaagttgaagaaatcggatttaaaaaagcgatgcatttcgactgagagcagggaggattgagcgaaactatcgtccgtctatgttatgtatggtgttgaacttggggacaaaatcgcatgtccgatggtcgaccgactccgaatccgacggaggccagcagcaagccaggcacaggctctatatgagtacatattcgtttttgttcccgtttcttctccgagtgactatacaattaaccactatccccttgatcaagaaacaagcagcaccaaaatgggcgttgaactcgttgcagccgacagtctggccctgaagatcctccgagtgactcccttgatcgccacgacaattctgtaagtgagccaactcagcttcgttttgataaagaggattacccttaacactccaattctttagattggtcaaccgactggcacaatactttgcgctctcctcgtttctccctccttatacctccaccaaaaaggttgaccatgttggcgctgccctacaacactggctccaaacggtggtccctcgaatttggactggagtcatcggtatcgtcttgattgcgcgggtggctcttatcctcaatttgtttgtgcacaccgaagacttagccggcacatatgcgcgattgctctacggcattggcctgttcttctcgtttgcgcacttattcattgcccccacgatgttaaagtttgagacgcgcatgatgagtccagatacgattccggaagtgacattggagctgttggccgggtggctcaagatcaataacgtgcggatttgggtggtggacgtgccgttctgggtggttggagtccttgctacgttggagtcatgcaagatgtagagaatatcaatttagggggggcgtaggaaactggatgtagaggagaagggaacggggtgaagggtttagggaatggacggttgccaattggttgagtgcgcggttcgcgatagagagaacagagtgagaataaacataagcggtcatgtgatataaaagtacacctgaggcagagatcacaacgcagacaccaccttctcttagtgactttttccatttcatacatatcctgcagccatcatgctcctcccattgtcgacaccgttccaaatatgatcctccttgccttgcgctcgatgaactgggcgaaatttcaaaaaaggccccttcttcgcccctgtaacatggtcctgtaatgtgtactcctggcagtactccattccctcggcgggttcaagatcaaaccgccaaatgatgttggaaagagtcaagagaatctccaccagggcgaggccttttccaatacagctccgcgtgccaagagaaaacggcatgaaggcctctcgaaccccaggaggtccgtcttccagccagcgatctggctggaagcaaaacgggtccggatagatcgttgggttgtggtgaatgctgtagactccaacggcaacgtcataccccgccggaatgtgacagccatcgatcatcgacccgccttcctcaacctcgcgccagagagcactccccgcaggaggcgacagccggagagcctcatcgatgcaggcgcgcaggtattgacatgagttcaactgtgtccccgcgtggatctcctccgcagacgcaaaacagctgcggacttcccgggttactcgctcgtacacggagggctctctgctgatatagaaaagtgttgctgccagagtagtggcggtggtatcggaacctgcgtggaaaagaattattcctcgctacgacacgcgttatttttattatgttttctctctcaacacttaccagcgacaatcaacgtagcagcctcgcctccaagttcgtcaatccgcaatgtcttcgcggtgacagtatctttggctgatttgagatatgaaaagacatcccgctcctttagcagggaacttttcttgaccctctctgagaccgtccgtctgatgaacttgataaagcgatttctccaaagaatcgaccgggagaacagcctcttatcgagccggaaaagggtgaggatgggagcctgcagaataacactcactcgaacattcgattcttcaatagcgttaatgatggggcggaacttttcctgccggatggtgtcatagctagcgctgaagaccagggccgacatgatgtcgaaggtgaggtagtcgactttgtgatcaatcagcatgggcaattcattttaggcaggttgacaggactatacaccactttgccatgtcctggcctttactccattttccatcgttactattaagatcgccctggagaataccgcagagcctttgtaccagctcgaggacacgaggctcaaaggaccgaatggctgcgtccgagaagccttgactcatgatccgccttctctgcgcatgtttctttttgtctcggagcgtgagggtgttgggcgcttgatggaccagcgtttcatacactttggacttgcggacccggctcccaatgccgtagatatctatccagcctcagtgacagtttcgcggcgtgacattcgccttgctcaggtaggtacttacccattaccgcttgggctgtattaaatgtcagtcgatccggtgcgtagcggatatgattccctgtgaaagaatcagtttatcttttgacacggacggatttatgaggccctaattgttaccgtatttctgatggcaccgccagatgtccatgtggatgtcacccttccacgcatggtaagccgcatagagattggtgaccctgcccaacagcggtccgggatatctagccaaggggtgaaaggtgagtcgataaagtactagtccaacaatctgatttggtattgtcagtaaagactagataactagaccacgctgaatgtgacatacacagaccagacccccgactactagtagtcccagggttgtcccggcagtgagcacgagttgccaccctacagtattcattagcacaatcacgggaataatcatggtaacgattgaacagagaactgatttacactgcggccgaattgctgcgaaggcttgactatctcttgccttggtggctaactaatagacccgagtccgagtccgactatccgaatggcttccgggactatttacgactaaaatgcagcatatatacatctgaaaaggccccgattcatactggacgcaatctaaagaaaatttagtaacaaaatggtgaccgaatccgagtttcctccgccaccagccaatcttggtacgccgaagacgtgcccgccattctttgcgacttgattctgacattgctagattggaacaacattggcatacagattcgcgagggtaagacacaaccctgtgagatcaagaccacagtgtagacatatcttaacgtactacattacagtcaacggacatgtccaatgtcgatataacgttcaaacgggatgctggagcgagcctgaggtggtcaagggaactgatctgactgtcagcggactgtctcctgcgttaaattatggtaagaattcttctcgagcgagccaaacattgtgaccttccgcgttgactgtggagaataggaatgcaagcctacgaaggcatgaaaggtcagtgcaaatcatacacccgccgccaagttaaactctataacgttatctctaatgctccaatgcagccttccgctatccgaatggacatattcatgtgttcagactcccggatcacagcgctcgtctgcgccattcgtgcgagtttgtctcgattcctcctctgccaacggatcaattttcccgttgcgtgtcgttggctgtgtccatcaatgccgagttcgttcctccgcatgataccagtgcggcactctatatccgacccctagtcttcggctctggaccgcagattaacctcatcttaccagacgagtataccttttgcgtctttgttttgcccgtcacgggcctcctgggagccagggcggtggacgcgctggttttggaagagtttgaccgcacagccccgatgggaacgggatcggccaaggtagggggcaactatgctcccgtcctgaggtggtcgatgcaggcgaagtcacaaggctatggaatcactctgcatctggatagcaaaacccgatccgaaattgacgagttctctgccgcagggtttatcggcgtcaaacagatgggcgaggatgtcacattagtcaccccggatagtccgaatatcatccgaagcatcaccagcgagagctgccttcagctggcacgttcatttggatggaaggttgagctccgacccgtgaaatacgaagagttgtccgaattttcggagatcttggctgtcggtacagcggccgtggtggtgcccattagttcaataacgagaacggctcgtggggagaagtttgtgtatacacctacggtagaagggagctaccagtgtgccacaaagttgtccaaggcaatccaggatatccagagaggtctcgcagaggacgtattctcgtggtgttaccctattatgaggccagaaacctaccattcaagcaaagagatcgatatataggtgcacagcataacatagatggatataggggattgttacgaggaccccccccccccccccccccccctccaccccccctttggggattcaacttaccagccctccacatcccttaacgtcgaagacctacaatttgtatataaaccactaacaaaatcaagtcatttttatgacatcaagtacttcatcgtcaacaattacttcaataactgctccaaaaactgcttcaacaacttcaacaaccgctctatcatcaccaagggatcaaaacatgtaggtatgagatagaacacacgttttttctaatcaaaatgtatttttgactatacaaagtagaattcaaaagtgtagatttaagaattaagtctggcagaattgaattaatgccttctgtgtaaggaagaatcaggcagaagggaggtccttgtaacaatcccctagatgtaaaccaacgtctagcactgtcatcatttcctcctaggctggtcaaaactacgtacaaaacatccaaacagatactgacactatttacacattcagccataggtgaaaacgggaatcgctgtcggagccgtactcacgtccgaccccgatgcttctcccgaatccgaagagggcgaacatgactacacctacaccccttccacatattacaacaaatagaaaatgagctctgcgtggatcataccgtcggcagttaaaacaggaggtttacttgtagctcgaaaatatatctcgtgttattttttgcttgactcactggcggatagataatgcagtgggggtttccagagcaggatgactaagcggctgtgtgacataaagaagcactcccgaggcctaactagatagcaacgcagacacctttccacctctcttctcagtagtcaccccatggtgttctcctctctagcaccctactactcccagtgacgactctgctctcacacctgtttcgcaggcagggctgtcggtgcccctcaggggtcccctcttcaataaatatattctagctcggaacaccggcgaatatgaaagaatgatgaaagagaactatcatactatagtcccatattgtaatgattctgaagaggaattatctctacgttctcaacgcctgatcaaaactcaaaactcatatcgcaaaacgtatcccacgtctcggatgtatggcacatggctcagagcccaggcgacacaccgcaccaagagcggcaactcattcgctccatcctgatccccgaatctcgctatatcacgcaggcgtagacgcggagccaaggcttccagggcctgtggctgatcgagtccccagtacatggatgtccccgtagctttggcgatctggctccggtgctgcaccgcaatcataatcgatccaaccgcatcaaatatcaattgtcccgagggaaaccgttccaccaggcgttgcaataggcctttgccttcctcctcggtgagatacatcaccagcccctctagcaagatcaatgttgggcgatccgcgggtatgtcctgaagccatgcgtcctccatgaccgacgcatcgaccaatcgatagtctccgccgggggtcggtagcagtttacggcggagagcaacaacatcgggaagatccagatcgatccaccgcaccttgggtccccactggagacggagggagcggctgtcgaggccgcatgctagacagataacggtcgccccggtgtcctcgtgacgttcgataaattctgtagtccatcggtcgaacgtgcggctacgcatacagatcgcgctgaactgcatgcggtccatcttgagtttggcaaagtcgtagtcgatctgatccaggattcgccccgcccacaggtcgttgagaatgggttgtggatgctgcgcatccttgaatcggcctaagagcgtgcccagcatggtttcttgcgcgccggtaaggtgtattttcttgttatcggccgacggcgcccggacattgttgtcccgccggcgaatttgcatttggatcctgaacgaaggaaggatgaagttacccataactgtcggggcgggccgctctgcgatgttcttgagatcgtagttcaggaccatgtacgcaatcgccagctttagttcatgcgctacaaagaaacggccgggactgaagtagccagcaatgaggaaatgatttgaattctggagaatgcgtgcaccacttaccaggcgtgtctgccatgaccgaagatgagatgggtttcactggttgtgaccattcccatcttccggtatttctctccttcagcaggatccttgcttccatcgctctgggccgcgtattcttcgataggtcgggaatatcggaatgcatcgtaagactctgggttttcatacaagtcggggtcatggtaaataccattcaagttcagcgtcaaggtacttccgtagggtatatgccatccttcgtccttgtgggtgatgccctcgcgagcaatgaccttatgatccaagagagtgacggcgaaattgctgcgcctttggctctcccgaatggcactatcaattcggtatagtttggcgagacccgccttgctccactgatagttctcctctcggaatacacgatcggcctcctcacgaagggcctcaagcacggagggaccagcggcgaggatatcgatcatggcattctgcgccgtcatagctgtcgtgtgaatcgaggcaacctccaccagcagcgtccgctgagcgattttagacgctttcaactcggttagatcgccttcgagccgagcctgtcgaatgcaccaggtgatgaaatcttccggctcggtccagctattgtaggctggatcaccgttggcttttctctccatatccatgagccgtttttggatcacaggaagggtcattctgatagcccggcgatggtgaaaccagttgggaatcgccaataacgggccgagcagaggatggaggcttcggggtaaaaagtctaataggaagacattccgcaagacgctttcggtgaatccaaccatgctgctcaacagcttcgagttccgccccaggtcttttcccaggaccatccggttcgtaatctgcggaatgagacccagccacatgtcccagatattgagacttttccatttttgcgtatccagcccgaactctcggtcaatggaatcttgaacctcttcctgcatgccaggagtgagttcaccgagggcccggatcaggttcctgccgattgcgcgattgttaaacggatcctggggatgcgcattgcccagaaaattatatcttgcgtaaagcgagtcattgttggcttcgtctgcgctgatcacctcgtccgattgttccagcaaccatcggatctgggattggggcaggaccaccgcagaacgtcgaccaaagccccagggcacaatgaatggccgattgttttttgtgtactggaggaagaagcttagaaagttgtaatagcctttttatgcagtctggtccacataccttctcgtatccctcttctacccaaaccttgtgtcgagcgtaggccaacagaaaattctgtatcgttgctagaaagcccttaccgtatcctacttgaggtagcgagtcggataagacgccttggtcccatttggccacgagtagggtaagtatgaagataccaagtgccccgatgatgtggtttgtagtgatgcctaggacaaaactctccatggcgccaaccatatgtctcgtcgagacatcgacacctaacacggtggagtgaaacgacatcttctcttattttccctttactcgaagatgagaagtggaatccctacttgacactcagtttccagatttctacttgaaggtgtgtctgtcgctggccattcgatctccgtctccgaaccactcggattcggccctccgagcgcacaagagccacctccggcagggaactaactacgcgatattatttcatcgcatagaagatagatttacctgtattcattcgatgtgttcgtcttaatgtcacatcgggtgtgggaactcgcagtcttcgccataacggcgacttataagcatcttctcaacctgttgttatcccctcagtatctcgcttttcccatctatccgtctgcgaataaatccataccagaagcaaccatgaccaccacggccagtacacaggtgcaggaggagtacaagtccctcaccgcagatctcccacccccgccgaggggcgacatcaccacgccggtcctgttttcccatgaatttgaccaaggcaccaatggatacatgttcatcaagaacccaccgccagccggtgtgccgtacaccaacatccgccctgccccctccatagtgacggtggaagacctccgtggcaaggaagacagcgtcaccctcgaccatgactcgctgcagatcctgcagggactgacagacatgccacgcagcccagcggttgactgggactcagacaccagcatcgaaaccaccttctacccggcggtcgaggcggccatcaagaaagcaatctcgaggtcacacaccgtgcacatcttccgccacggcatccggcactcgaagaactggcctgtcccgtacaatccaccggccatgatcgcccatctagaccaaaccggtcccgcggcagtcaaccgagtgctaaggcacatgggcccggtcgacggcccgcgcttgctgcaaggacggtaccggatcgttcatttctggacgcccctcaacggccccgtctatacgtgccccgtggccatcgccagttcggccactgtcaaggatgaggatattcgcatctttattagtcatctcggtggggtcggcggcctgggcatgcccttgggccggcccgtggcaaagccggatcctgccgagcagtaccgcgaagattttggggctccgcggtacgcggaaggacagcgatggttctatttaagtgggatctcacaggacgaggctatgttaatccagatctttgattccaaggcgttgacgaaaggaagtgaagtaaaggggggtcgggcagtccattcggccttccgtgaccccaggacaccacagggtgctcccgatcgttggagcattgaggtctcctgtcttgtttttagtgacgagtgatgcttttcttttggggtttaattccgtgaaggataggtgcaattagttgcagtgcgaagggcatattcatattaggtaacaaagagcttttcatgtttgcattgtttgccagtagcctgtagggtaagaattattgtcggataaaccgtttccgtaaaatataggtccaatcaatggagttcaatcagtctgtatctctgtactggctcaactggcaatttatggagcctgattataaaataaaataaacaataacgtaactaattcacaagcgagtggccatctccaaaacacatattaaatgcaacatattctacatttatatctcaaccgtatgttcatcctatctccccgtttgtcgatagctattgataagacttatatatcaattttgaagagagtagaatactatcttactaccatttcaaaaattacagaaaattacgtccctaaaagctagaaatatatatatcgcagttataaagccattaattttcctaaggctgcctagatatgctagatatcatatctaaagcgctatgctacaaagacaagtccctatagactaccgttgttgagatatcaagttgtaatttattacatttactatgtgttttggagatggccactcgcttgtggtggccgctcgcttgtgaattacgttacacattgttaggattaatagatcctccggtattctctggtatgccgaccctgcgttctccgacaattatacttccattgacaaacatatatatgacattctgctttcacattattagacaaacgaattccataataaatcacttctctcaagtcaatcctcgatcgctatatgacgacaatcattctttcttttctacgaccaaagatgtatccacacccgcttcagaatccttggcattctcagacttgcccttctcgtccagtccgaactcagtgtccaactcttgacgcaaaggaacatccttttccaagagcacaaccagtaaccccaaagctgcaaaggcaatggccacttgccaagtcctcttgatgctatctgacagaactgaaacgaactgcttcagggtttctgacggcaaagtgttacgaaacgcggcggtagcatgctcgtatgcttgtccgccgagaagctcggtacgaactcgctggtctccgatgcgtccgggagcaaggctatcgaagcgattgttcaagacggctgctggaatggccgttccccactgcacacaatgtttggattagtattgagtctcgtttgcagggtctgaggtctcgtaccatcatgccaaaggttcgcaggaatgaccaagttgcagtggccagcgcggtgtcagcttctgtcaatggtgccaggacggcaggaagtaacgtgggaatgactatatggaggggtgagcagaagacaaaaaggggcaaatcgaatggtccatacctagacccgcaccagcagactgtatgatctgaaatcctacccaactgcctgtgttggagcgctcgtctagcagagtcaacagtccgaagccgataatcaccaaagcaaaaccagcaccatggatgaaccgatattgacctagcttcgacatcagggttccccctaggccagcaaacggtactagcgccagaatggtcggcaacaactgaataccagatcgggtggtcgatgaacccaggaccccttggaagtaaacgggtaggaagaagagtgcccagattgtgatgatcccgtgtaggaaggtcagaatgaacgctatcgcggacgtccggttcgaaaagagatggaggggcatcattggatggggagcgagtcgcggcgacgcttcaaacaacatgaagcccactaaacccagcatgccgatgaccaaaggcacaataacgtggtaggacgaccacggatacacggcgccggcccaggagagcgcgataagctatgccaattagccatcaaggccccagcgggaagatcatgaatgaaacaaaatcaaaatcagacgtacaatagcgcttatggtcgccacaaaaagcacgttgcccaaccaatcgatctgcgttagcttatccgcaaaggtcttttcctgattgtacttcacatgaaggaacaggatcaggatcaccaacgccacgccaccaatcggcaggttcagataaaacacccaacgccaggtggtgtgttggacaatgaggccgccgaataaggggcccaaggccgtgccgagcgcaatgacgccgaagatcataccaatgtattgccctcgttgacgtaacgggatcaagtcacagacaatgatctcaatgaggacgttgattcctccggcacccacaccctggatcacgcgtcctgctattagcattgacatattgctcgcgccgccgccgattccgctgcccaagatgaaggtggcggtggaaatgatggtgggccagcgtcgtccgaatacattggccagctgtccctgcagcggttgcaaggcggtcctgatggtgggttggttcgtcagcgcgcctcggacggggaatcagggggtgggcattggtcgcggtacatacatggcaagaaaatagccgttcacggcccagacatagcggtcacctccgcccaaatctgcgatgattgaaggcagtgcggtggaggtgatggtgccctccagggcagtcatcatgcccacaaagcaaatggcgacgaggatggcatagaaacggggccctttcttgaaggtagcggcagcagccgcggacttgggtgggttcgtggggccactgcccggctccccgtcagcatgttggttttggcctggacctgtctgttccggtgtcatctttcttgctgttaagtccctcggggcggatagtgactgtgtgggtggtgaaatggtgagactggcaggtaagagtgacaagattggagcagccctcactcgggggaatggccagggtatccatcatagcgaggcgtgcacattctttgtttgatcgatttcactattccggaacggagtcttgatttctaatctgatgcaggttcggagtcggacatctccagtacattgattcggagagggtgccattggtcactgtcctccacactgctccacattgcccccaaatttcgcgtaagcttctttgtagcttgttcatcgaatcaatttatccccatagtaataataatgacagttgttgagagatcggtgcatgaatttcctctacctattcctatctctcgagacatttactgtcttccttgggaaatatcaacaagttctccggtgagatgggaaggtctcctggtatggggctggtggcacggacccttaggggtaaagtgggtatcacgggagctctccgagacactaggccgaagagagttagatctatttgttattttgtggagatgaaatatgtacacgtttttttccgatcacaatgtagggttttttttgactatgtggagtagaattcaaaagtgtagaattaagtctggcagaactgagttgatgccttatgtgtaaagcagaatcaggcagaggggggtcccattagccaagtggggggatccctgtaacgatcccctttttctcttgtttgaaactgcgtttgctttcttataggcttatacaagttatttcgttaaacgatgagtacaaacaaatggagcatgtaattatatagtttcgaatggctcagccgacacacaccagtttacttttgtgtgccacaagggtcgccaatgcggtcactgaggagctatgcatcacgtcgaaaagagagcactcggcctcgaatgtggccaccagccaattgcgcagctcaaccgccactaatgaatccacaccaaactgcgaaagcgacatgttggggtctatttccgacaccggcctgctaaacatgcctgcgagaatcccgactagggcgtgtgtgatggtctggacggcctcaagcaacgtcgtcgacgcggtaagctgcttcttgatgttgggcccgctaccgtcaggaccggcggagccttccccggaaccggtgaggtcaccgcgctgttctaacccagcaaaacgggtatcatgattccagaatgcagctgaatcagaccgggtaaacgtggatgggatgcctgtgactacctggcatgttgtggatgttcgacggggatcccggatcgcggattcgaccaggcccaggacttcctgttcagacacagctcgcagccccagtttggtgagatggtctgcaactcgctgcgtccctgcgaccacacctacagacgagaccattcccagatcgattgacacagcagataggccctgtgccgcgcgatgtcgggcgagagcatcttgaaagctccccccggcagcgtagttcgcctgtcccgcatttcctccaaagccgctgatcgaggagagaaggacgaagaaatccgcatccagcaacagttcatgaagattccagctgccctggaccttcggacggagggcggccatgtaatcagcccacttcatctgttcaaagatgcagtcctatccagggcggttagcgggagtgaaaaactggaaacatcggtcggtctgttgttggccgttgacttaccttgagaaccatggccgcttggatgacccccttcaccggtagcatgcggcgagcacagtctgcaaaaacagccatcagctgactcttatcggcgatgtcgcagctgtgcagggtaacggtcgtgccatgggcttcaagagagcggacaaacgctttcctagaatgatcgagcgtcgaggcactgcgggagagcaggacgagatgacgggctcctctgtcaactagcatttgggccaccgattttcctatgccaccgaggccaccaacaaccaagtagctcgccttaggggagagaataataggtttgggagcgggcggcaggacctggatgtatgtattagctgtagtttccagagcgacttcgtcctaggacttgtcctaccttgacaatatcgccgggccgtggctgtaaaatgattttgcctatatgtttccccgtttgcatcgtgcggaaggctttctccacctcgcccatggagaacgttgtaatagggctcaccggacggatttgaccggcctcgagcagggtgttgatctcgccaaagatgcgggccacttccggtccacgctgttcccccagagtaatcaagtccagcgaggcaaagagaacactgcggacgaagggccccatctcgaccatactgttctgctcaatgtccttctttccaatttcgatgaaacgaccaaaggtgccaatgcagcgccatgtctggcggagaagagggccggcgagggagttcaacaccacatcgactccctttccgttcgtggcgtgcatgatatgatccacgaaggaatcgtttcgactgctgaatatccgagacggagagatgccgtagtgctcagcgatgaagtctcgcttctcctccgacccaacggtcacaaagatctctgcgccagctgcctgggccagcatgatggccgcttgcccgactccaccggttcccgaatggatgagaacagtctctccgggcttcagatgagccaaatcgtaaagggcatggtaagcggtaataaatacaagcggaactgaagcagccgtggggaaatccatacccacggggataggcgcaacgctggtgtatgggatgcgcacacgggtggcaaagtacccgatgataaaggcgtatacataatccccttccctgaaaccggccgcgcgagcttgaggagtgacatgggcgatgactccgctacattcaaatcccatccggatttcatccaactgacccagggcaaccatgacatcgcggaaattgagtccaaaggctcgtggctcgatttcgacataaccgtcaggtagcggctcattcgccaaaggatcatggccaaattccaggctgctaaggagacccggagtggtcactccgaggcgaactggatggccgatctcaaagaagggcttgagctccggttctctccgcagagagagaccagagacgagctgggtttcgtgcacgttttcgcaaacacgtgaaatgtggactacattggatcgaacagaatattccgtttccagtttgttatggggcgaaagataaaagccgacgtgtaggatacgtgcgaccacatcggccgagtgtgcactccatgccgcagattccggagccaggtccaaggagacatagcgcttggcagtgttctcacatcggagggtccgtaacaaaccctgatggagagcaccccacggctcctccgtaatcgcttgggccccccgagatacccataaggagccctgggagaagcccaacaaatggcgcagggcgttgaactgatcctgagtgagattatggagaagagggctaaccagatcatcgaggaagacacaaacaccactctcaacgttgaccgcctcttccaaggagtgaaccgacaaactgtaggaaccgtgttgatgaagggtggccctgagggactgtacccagctctccggcggtgcagctgtggagtacaccaacatgatctggcgtgatgatggcagttccttcgccacctccggtggaagaattgaagccaaaattacttcacctcgatatgattcggcatcgaggccctgtacaacctgaagggcgcaggggtccaatccagctcgctcgagtgggcccttccacgattcgagggaggcgactcccttccattgcggcatcagcctcaggataacctggattgcagaatcctgaatgctgtgtccaaatatcagacatttgcctcccggcttgagcaaggttcgaacattcttgagaatctgttcaacgtccccagtgatacacagcgcagaggatagaatgattaaatcgtatgtctcaggactaaagccttgatcctctggaaactcgctaggggtgtaggtcttgaagtgaactcgcccatcataatccttcaatgcatcctcatctgttgtagcccgtgcctcttgcagctccagagtcgccatatcgtagtcactgaaacctcggtccgtgcctgctgtcaatgcatctagtatcatacgggtcgtctggaaactgccattgctgatttcaagaatcttggactggggtgacttgtagctgtacagacctagcaggtcctggacaacagagacgcaaaagtcagctggctgagatgaagacctttccagaagttcgaagtgacaatgctcagccacgattcgagcgtccgtttgtccagaaaggatatcaggtaatgctcgagcaaatcgggtgagaagccttccttcctcgacctcttccaggtccgacgccagcgccaggacgtattccgcgctcatgccatcgaggtctagtgtgggccgagcctcgtcgacgacgctcttcatccaagtccaataagcttgattgtctgccgtgacagtctcttctttaatctcgcggagcactgcagaaagaaagacaacggccatctcctggagtcgcgagaatttgagctgtttggcaccgagattagaagcttgggagggacgcagatcggcggcagtgacaaagtccacgtctggtttccagatagcctggtaacagaggttgtcatgcggctcatcaatcgtagctgtcccgcccagtgaccgaaagaataatccctcgatcctcagtaccggctcccgatggggaccgggggtggttgcatcgacgagccggacagaggactcaaatccgtgaggaccggaccggatgagggacgaatgagactcaaaaatgtgtccaggctctgcactcaacgaagacgcaatgtacaatgacttgatagcggtcggaatcagggccgttcgttggtccgttcctccggagggtaggttatggtataccccctggaaaaccgagtccagggtggtcggttgtatgagatggggttgttgatggcggtgcggcatggagtcagccgtatcagccactttgaatgttgagatagagtgcccaggcatcgattgcgcagcgatcaagttctgaaatatcgggccgtgattcacgcctacggcgtgcaatgccttgtatgtatccgccggatcaattgttctccagttcccttgctctgcttgattatcaatccccgaatcgacgaaagccgggccaacccatccacttccgttatgtggtgcgatagttgcacactgaccctcacagtgaatagtccacttgccctgagtatcaaccgactggatctggaagtcataccagccctggacccgaaggactccgtcggccgtggggcgcatggatgtgcgaacctcgactccggcggccgatgtatcgtcgaggatgagcggattgcggatctgaacatcctgcagctggtaccccgatggagttagcgagaattcaccgccaccaagttgacgcagaccctccacgaccatactgatgtagcccgctccgggataaataatggacccctggacgacgtgatctcgcacccagggaacgtcccgaggacgaatgacatagcgccagctgggtgttgaaggggtggaatcggcggcggcaacgcccaatagatcgtggggtgcgaaagtccttgtccgcaggtcacggttcatgcgtggttcagtccagtaggacgtctcgtgattccatggatatgtcggcagatcggtgagcatcggtattccctggtggctgtaagggaaattgaccgccccgagatccaccggatagccttgtttgactaacgacgagaccagacggtgcatggtctgcacggcattctccccccttgtcaagcacgactcgtaagcgattcccgctggctgtagctctgggagctgaagggtctgtcggactggaccggccagagcgccgtgcggcccgacttcgatgagcagatcaaccgcgggcgtgccatcagtctccgccggattaacacagaggttgcgaagggcgtcgagaaactccacaggctgtaccatgtttcgtacccagtgctctggactcgcgatttcttctccggagtacatacgatcgcctgtcgtcggggatgagtaggtaattcccccgtcataaccgggttctggctgcaagaaccgggacaacatttccctatagtcgtcggcaatgggcagcatatggtgagagtgataagccgcttcgacctttaggcggcgagcaaacacctgctcttgcgctagaattgcctctatctcctcaatagcgatcatatcgcccgagatagtcacgctggatgggctgttgacgcacgcaatgacggctttcccagattgaacccgggagagcacggcttgggcattctcgcgacccagaccgacggccaccatcccgcctgcacggtcgagcagcctttgaaactgactggtcagatcgccccggctgtagacgatggccatggcggccgacaggctgatagccccggcggcatatgcagcgccaacctctccgctcgaatggccggtgactccggtggggtgaatgccccaggatcggaggagattgactagggcgatttggaccgcgaccgacagcggcaggctatgggagacttgattgacgcggctctcgttggcatcgcgctgtaactcctcgaccaccgaccagcttgctcccatagagcggaggcattcatccacctccccgatagtctgccaaaagacaggataggcgcttaagagctcccgtcccatggcgtgccactgggcaccttggccagtgaaaatcattcccagccggggagcccgcgaactgcgatggggagacagctgtgtggagtcaagcgtcgactgcagggcggccagcgagtctgcttggcaggccactgtccatgcaaaccgggaccgtcgttgccctagtgtaagtgccagttgatccatgagatggtcatttttcgactcggatcgttctcctgcctctgaaacatattgtcgcagttggtcgaccatggtccgggtcgtctgttggtctttggcgctgagcacgaacactcgagaccgggccttgggattcggggagcatagctctgtcgacggggccaagagaggaaggagatattgtgggtgttcgaggatagcgtgtgcattggcgcctccatagccgaagttattgatcgacgctcgacgtagcgagtgtgagggccatgactgcaggctgagcgggatctatccaaggtatgggatcagtgattggtatccataggcgccacgagtcaaaatggattgctttggcctacctttagtttcaaagtctccagcgagatcttctcgttgggggactcatagttcaaatgcggtgggattttccccttctctaatgccatgaccgccttgataatacctgcaagaccacttgccgcttccgtatggccaatgttcgtcttgaccgatccgatcagaagcgggtgttccccgggtcggccattgccaaagaccgtgcccagtgcatgcgcttcaatggtgtctccagcctgggtcccggtcccgtgggcctcgacataggccgtatcaacggggtttagagccgccacttcatagcattcccgcatgagcgtctgctgtgcctcctggctcggtgacgtcagggtggccgttttcccatcctggttagcggcggtattgcggatcaccgcgcgaatgggatcgccgtcgcggagggccgtctccaggggcttaattaggatggtggccacgccgtccccgcgaccataccccgatgcccgggagtcaaaagcaaagcactttccttccgcggagagaagactaattcttgtcagaaatttctctcttacgttccctccctgttcaagtctgaacgtacctgaggttggttccggaaataaacatatccgggttcaggagaacattcgatccccctacgatggccatgttgctctcgttagctcgcaggctctggcaggctagatgaagtagggtgagagtggtggagcagccggtgtcgatcatgagactggggcctcgtagatcatagaaatgggatacccggtttgcaatcatggccgccccattccctgtcaaatagaagcgcgcaagggtgtctgggtctcgcattaagctgtcgtgattatctcgaaagcaggtccctgcaaacacggccgttcgcgagcccgccacctgttcgaggggaatgccggcattctccaacgcctcgtataccgtttccagttgcattctgacctccgggtccattgcctggtctcgtcagtttgcaagaaaaatgtcagggtggaatggtgcccttacactagccgtttcggaagagaggttgaaaaacgacgcatcaaattgggaggcatcttgggttagaaagtgtgctcctttcacgtacgactatagaaaaaccaaaacagacactcgttagaccacttattgaacccggaatggatatagatggaggtggaaagatgaaataccgtcccgaggtgctccttgtctggatgataccaggccgcctggttgaagcgattcgaaggaatgggggaccaggcactgcgggcgttggcacaaagttcccacagcttttcggggctggtggcatccccaggaaagcggcaggccatgccaatgacggcaatgggcatgacgggcaggtcaagctctggtgcgagggagtgatccgtatcgccatcgctgggactaggagttggagacactgggataatcattgggcgaaccgctggatcgatgagctgtcaaaatggcgatattggttaaatcgctgacctttgcgcacagatccgttcattttaacgttattattataggttgtctcgctggcgagctttccttattgtcagtatacgctgtgtggctctccatcttcggatcggacattgtcatcttgttcggtcggagtcggagaagacaaagaaacagacattggagggttgagggtctggatggatccattaacgctaagcagggactgttgtctcaaacgacaaagaagaggcgtcggaatgactccgttcggtctagggggaagagaggcttactggctagcctatccgggtatgggttcggtgttaccccaatgtttgaattgattaataaattgataaatggcctgtcatccatttagtaagattgggggtcgttattctgtgctctccctcattcttccctgctctaatacctaccgagtatatatttcccttccagacggccttctcttgcgaaatacctcgcgatggccttcaacgcccagaataccactaaccaaggcgatatctcgcaagatgccatcctcgaccacccccccgaggacagtatctccgaactggcctggtcgcctatcgccaaccatctcgccgtatcgtcctgggaccataatgtacggatttacgatgtgacgcgctcggttaagggcgaaggcaaggcgatgttctccttcggcgggcccgtcctgagttgtgcctggtcgcccgacggctccaaggttgtgggcgcgggggccgacgggtcggcgcgtctcgtagatctagcaagcggcaaccccactacagctcaggcccagcaggtggcgcaacatgatgcccccgtgcgcagcgtgcgcatggtccaaattcccaacagtcaggtgccgatcgtcgtcaccgggtcgtgggatcgcaccgtcaagtactgggacctacgccagtccaccccgcttggcgtcctggaatgttccgagcgagtgtatgccatggagatctgccagggccaattgctggtcgccttggccgatcgccagatcagcctcgtcaatctcaaccagcccacttccgtcttcaaaaccctacagagtccgttgaagcatcagacgaggaccatctgctggatccccgacgggtccggctttgcggtcggcagcattgaaggccgatgcggcgtcaactatattgacgacgccaaaaagcagtgagtagctaacccgcacccatataatatccccgatagattaatttccagggagaaagaattgccctgatggagatgtgacccgcagatcaaactttaccttccgatgtcaacgcacccccaaagacaacgaccccaagaaccaactggtttattcggtcaatgcagtatccttccatccgcgctaccacaccttcagcactgccggctccgatggcacctactgtttctgggacaaagacgcccaccatcggctcaagtcgttccctgccgtcggacacagcatcacctctaccgcctttaacctcgacggcagtatcttcgcctatgcgatcggctatgactggagtaaaggctacgcctacaacacgcgcgattatccgactaagatcgccttgcacccggtgtccgacgccgaatgtaagccgaaggcgaccatgaccactcggaggtgacaatcggggtcggaagatagctggataacacaatgtcagaaataatgttccgatgtgttacaacactgcgaaggggcagaacggccaaatgtcaaatgcctgaccaggttcgtggtctgaatatgcctgaatatagactggcagaaatcaaaatacctgaagttatcatgacaacgggcttgataaacaaagcatctaatgttggaagttggaacttagttcaaaaaatgaagttattcctaccatacaaatttccgtatacacccgttttgtacggtcggagatttatggcgtttcaatttatagtacacggtaactatagagcggtgtcgaaagcggtctataattcgggcaaattcaggtataaaccctgaaaaatcgggcagggggcagttcacccaacctgtagcccacccaaggcacgtgactggtaacctatcttatctccaccggttgggtcaacttctataatttggttttaaacctcaccaatacctcaccaataccaactttccaccaatcatttctcgtcaatacctctcatcaaccaccgaggcgaatcagggagaaataacacattaattgcggagcgaagcgaagcaattaaatcataacctcgtgtgcatgtcacgtgaacgttcttttctcctatgggctccaaaatcattagaatcaatgtggtgaagtagtcggctagctttagcagaataatccaaccaatgagctttttttctcatcaaaatgcatgtttttttactatgtaaatcaagattccaaagtgcagaattaagtccggcaaaattaaatcgatgcttgattagtaagattgaatcccgaaaaatcagagaggggggtgtcggattatccaaggagggtgaacaatcccctatttttattagtggtttacatacaaattgtaggtacctactgccggtggagatctcatgtgattccggcgggtcaccggttggaccaaaaaatggcacacaggttgggtgaactatcgtctcgagtgagagctcccaactagaacattggtccattgtctaccgaaaaatggccattttgtctacccgcgccagataaattggcttcaagacgacataagccatacccttcaatactttcgttgatcgaatcctaaaaggtttcttccattctctgtttcgagaggctggcaccggtattttctgatctcgcaacgcacactcttctcgttgcctgctttgcgccgaaagctttctgacgccctgaaccataccccataaataaacaaaaagagcgataaagaagacatcacgttccagcggtaataacgacacgaatctgcatcacagtattgtcgacaaacgaaagtaaatagaaagacagatacgaaaatacaaagcgtaaacctccacggcgcgggttagcagctagtacccgagggttagaaaatgtgtcctataggattggatgtctgtagaacccaaggggttccaatgtgtacgggcgactaagtgtgtgtgcgccccagagggtggtctgatgtgtgctttttctgattcaatccgggggagggaccggaagagattttcacttctatgataaacttcgcaaaattgcgaagagagaaaaggagagttgaaaaatcagaggagaaaggagtgggtggatcttctgccgtcccgagtaactttcgtcggcccgaggccgtcggcccggagcggccggccttggcaatgcttgggcaaactctccagccaactttggactccagatcagtttatactgagctccacttaatttgccaagtctgggcgaaagaatcggcgggccattttgccaaattccaggcatcaaggccccaatctactgaaaacgaccctacgctatgccccttcgtacctggggggtcccagactagtataaggtaaattttttgactagaatgtgaagctcactgctgaaattaacggccagctcaacgtttgagaactttcttggagatgccatacgatgtatcagtcagaatgctctagcgtttaaactcgtgaatagatccgtatcaatagctgcatacaaaaatcaatagaaacaatctctctaccccgattaccacgtcagcaacatagctacccccttagacacccaagaaccttgccgcgtcagccctcccgatgtaagtcgtggacgtgccaccaaccgtgggaacaccactttgacgtcaggtctatccatctgaccaagatactcgaccaacagtgcactgaggcctgcctgctgggcctccttcaaccactcccccatgggtaatgcccgatacgatgcacccgtacccttctccaagtatcgttgtattccatgtagtgggatctgctccccaagatggtgaaggtaccgtacctgattcaagggagagggatcccgaggtgccagaatctcgcgtacaatatcccgagccacctgttccacaggcacaaagtcgagatagccctgccacgaggacttcgcggggagaggaaccgcacgtagtttcctagagaactcgaggagattgtccatcaagtccaagggggatgatccctcgccagtgacgctggaagggcgatgtatccagacggggaagtccgctttccggttcgcctcttcgagcacgcgctcgctggcccacttggaactcaagtatccctgggatccatcggtcggaggtaggacgctggcagcggagacctctgcgaaagtcgaggattgggtgaaattggcgacgccgctggtggaaacgtagtggactggcacctggcgcggccacgccagctggagcaactcgatggtcgaatccacgttggctcgacgaagggccggataattcttgaggaagctgacatcggctccgttgtggatcaccgcgtcagcatcattgaagatcgcggtggcttgggcttctacaagtcccaacctcggcagcgtaagatccccgtagtgcacaataatcttgcctgcggtgaccagaggagggcgccgagtgctcgtaacccggacggcaatgcagtgaacggtggctacggccgggtcttccaccagccgctggaggagagctcgcccgataaatccagtggcaccggtgagcacaatgcagagccctttcagattctctaatcgagttgtaggggccatcggtgttgacagctgaagctggtcgggaagctgaatttcctgctcccaaatgatgggcgctgctgccgttgtagcaacgggaccagcggcaattttcgccgcatcggtcgacgggtcgaggaggagagccatcttctgcaccgtggtcgctccgaatagctgcactagcggaatttccgtgcggaactccactttgatctgccgctgcaactccacgagcagcatggagttgcctccaaccgcgaaaaagtcggactcgggctctagtccatggatggcgataacatccttcgagatgaccgaccgccaaagctcgacaagccgggcttctgttcccgtgagctgcgaggtgagacccaccgattctgcctcggtctgcggaaggcttcgagtgctcaaggccttgcggtcaagcttgccgtgggctgtgactggcatgtcatccacggggagcaccatggacggccacatgtaacgaggcagaggcagagatttgctaagttcccgcaaggattgcttgcgttgctccacaggatatccggcaaggaaaatcacataagcgaccagcagttccgtgttggtattggagcctgtatagagagtgacgacggcctccttaagcatcccttgcgatgattgaaggatcaccgtttcgatatcgcgcaagtcgacgcggtagccgcgcaacttcacctgggtgtccccgttaatccgaccctcgatttgaagttgtccgtctggccggattcgcccgcgatcgccggtgaggtgaacccgtcgccatccttgagccttttgttcggccgtggcgaatcggtcctccatgaagcgactgcgtgatagatcctcgttgttcaagtacccatgcgcgatcccaggaccaccaataagtatctggcctggaataccaacgggaacggggttgagcgcttcgtcgactatgtagatggagtaattcggggccgtgtatccggcgacgaccgacccacggtgcatccactcctgtggactctgggttttgctgcggaggtacggcacttgcagtttgttggaagacatgctggcttcggttgggccgtacccgttgaaaagtcgaagatcccgcttgttcaactcttggaaatcatgaatcatgctcgaagtcatcggctcccctgcactgaccgcagtcctccatttggacttcttgagacccgacaaatcaccgtgcataaaccaactgtgatattcggaaggagtggcccctgcgacggtgataccctccgtaagaatcgattccaccaaggccaccggatcaccacgtttagacagcggggcaatgaaaagcgaagcggcgtttgccaacgccatgaacacctgccataccgaaaagtcaaagctgaaagcaatttgctgcagcaggtgatcgtgcggccagagtcggaactcctcctggtttccttcgacgttgacgcgcaggttctcgtgggtcaatgcaatgcctttgggagcaccagtcgaaccgctagtataaaatatcacggctggatcttccaagacggcacgattgacgacagggatagggaaggacattggtaaatcgtagatgttcattgacagtgcgttcgaacaccccaattcgtccacttgatctttcgtctcattgtccacgagaaggaccataggcttacagtcatcacagatcgatttgagacgtggaatttcgagccgaagatcgagcggaacataagtagctcccactcgcagaatggccagcatagaacagatccagtcggccgttggatgctgaaacacacccacacgttggccacggctgacgttggcgcctaacagagcgaacgcaattgagtcgattcgttgactcatttcctcaaaagtgaatcggttgttgaggccgtctttcaaagcaagtttcttggggaaccgttgcaccatcgtgtcaatacgatgggggagcgttgctggccatcggctgggcactgtcgggcctgtgtaatacaaagacatcgttaatagtggcgagatcaggcttgggggtgcgtgcttaccttggctgagtgcaagggacctttgaacatcctttacagcgaatatagacgcctggcccacgggggtagatggatcattggcaaagactgcgaccatgtttagaaaggcgttcagaagagtctcagctgcttcggtactgtatagggattgctggaggccaagaatgaccaatggctcgccttccactttgtcgacaatatccaaagcaacatcgtaggatgttcgacccatttcataatctagaccttcgaatagacattctccgaactgccgtttctcgcggacatcctgccgataatccatgaaaacttggaacaacgggttatgggatggcgatctcggaaccttgagttcggatagcagaatatcgaatggcacctgtgagtgagctaaagaactgtagaccttcttacgagctgatcgagttaactcaacgaaaggcgtgttggcatcatagtgcaaaggtagggcgagcagattcaagtatggccccacgctgtcagctgcttctacctgaatacggttggcatcagccatgccgatgcagatatcctgggtctcagcgagtcgacagagcagtgcctggaatgctgcaagatagaaatgcgaaggcgtgcatttgacagattggcaaaactggcggatttgtcttcctagacttgggttcaggcgttgttgcactcggtgatgaccatatcgtaacagagcttggcggtcagatacacacgcgaaaggcagtaatggaaagtccgctgggggttcgggaaatctctctctccagaaggccaagtcttcattccacgagccgttatttcgctgctgacgttgtttggccgcgtaatcggggtactgaagtactcgcgtactgagagaacgtccttcgtaggtgttttgcagttcagagagaatcacctccaggctaacaccatccatgttgatatggtggtatccaattatcaggaagtgcaccaggggtgttgccaacaccgcagggcacaacagaagcaccctcattagctgtccatgctcaaggtcgtagatgtgattcttaacctctcgcatagtagcctcaacttcagacattgtgtgataagtcttcctttccagagacaacgttgagtgtggcaggatgatttgcgtaggtgattctccatcctccgcagaaaagcatgttcttagggcttcatgtcgttggcccaccccttgaactgctcgctcaagggcatcaactgaaaaggcgccctggattcgtaatgaacaagtgatattaaaggtagtctgatcctcaaggtataagcggaggaaccagaaacgagattgtgcaaaggagagtggctccttccgtaacgccgagtggacactgtcgcccggctgcttcaggagattggcctggctcgggttatccggaagcggcaaattatgctcatcttcactgaatgaaggcgtttcgatgatgctgaaggacccggatgaagtgtcctcgcctcgggatatatcaacgagactggaggtggtgcttgcccgcgtagatgaactttggccattcgaaagagactttgaggagacagtccgtccaggtccaccgggtcttggccgagcaacagggtccgcagaactagccaacttgggaatactgccaagcttccgttccgaagtccgggattgaatctcagattgctgtctaacaacagcctcaccaacccgcggcacaggagcagctccaatgtttggggtcatctcggtaggaagcctatctaaggcgaagtggagaatgtcgtcaatggtggcacctcccaaaatgcgtagtaccgggatgtcaactttcagttccttcaagaaccaggatctgatttcgacagtgttcaatgaatcgattccaagctcatctgcagctttatcgaggatagaactgctggccacatcatgcaaacccagcataatctggagcttagcaaagaaagattctgccaccaagtcagtatctcgatggtatcccagagtggattcgaacataccttgaacaatcttggagatctcatcagctgttcttgcctcaagaagctgtagtcgaagcggcatctgcctcttggagtcgccatcggtttctgtggacaactcgtcgagaacgactagatgctggaatttcgggctgtatgaccataacggacgctgctcatcaacatctctgataatacgcagcccacatgtgagctccaccgtggcgttggaactaggagacccagcgaggatagcctctgcgaatattgtatggaagtcgccttctgacatccacacatgaccactcttcagaagatttctttgcagcgcctcgctcgtttcacgagtgacatagccgactcccatgatcgctccaatatttatgacagaacctgctagcccgcgctgtttgcggttcgctgctagtgcggtcatgaacatattggcagcggcgtagttggactggccgatattacctgtgacgcaagttgcagaggagaagaaaatcatgaagtctagaggatggatgtgggagaacaactcatccagatgaatgctgccggtcaccttcggtttcaacaccttttgcatagcttcgatgtccatgtccttaaccatggtgtcttgcagcaccatcgctccctgagccactccagcaattgggggaagattccgacagatgcggtcatatactgaccgcagactctctcggtccgtcacgtcgctgtgatctattagcttcgatttccttcgagaagccacgtttcttgctccatagagatagacttacccggcatatacttcaactctagctccagaggttctgagctcctggagaattgtaggatcgatgttggggtttcggctagtcagtaccacgttcatggcgccttgccaaatcaaccattgacaaagggacaaacccagggatcccgtcagaccgacaagccagtatgtcctgtcattgcgcaaaaagggataatggtcaaccctgcgaatcagggaagaaaccgttgaagtggatgtccagtcgatgaaggagaatgcagattggttcagagataggctactgatatcctggagtgggatgaagacctgctctgcttgtctcatggtagcggcatcatggtgtctctccgtggctatcatctgtatagtctcagtagggatgtgctcctctgaacttcgcacggtatcgctgcagaaattagcgagccgctcaaaggtagacgacgagtgcaatgccgagcgaagcttcaacgtcaggctgctgccctcagcgccgggtcgcatgtccaggaccatcaccggctcgttgggcagtaactgttgcaatgatcgtacgtgagtgtgcggatgcacaacaatccaggatggctgcatgtgattcccatctgaggtcaagaagataatgcgtaagcctctctgagaggcatggaatgctagtgccgatgaaacgaccttctcaggctcaatcacgatcagtgctgtatggctgtgggcagacgatacaatggagcgcgcaacagcatgggcggccgcgaacggtagcaacttcgtgggggagtcgtcgctaggaatggtccagctgctgggaatgtcgaccactgaagagttccttgcagcaaaaccaaagactttctcacccgttgcaacaactgtgccggcgaccaaatatagatcattaccgctaagtagacggaccgcctttagagaagatgcctcgacactaattcttttcgagcctgggggagtagcgggagagtcatactcagagccatgttcaacgacataagcccccgcattcccctttaccgtcacaatcttggagcggaggtcgacctcttccgcaattgctcgcctcgatgcattgtaccgcagattttgggcattattgagtaggatacgtggaatgaactccttatctcggatcacagccaattcttgctcggtgctccagagcagcctatttgctcgctcgggattgtctgatatgttcacaccgataaagcgcaggatagctcgtgcaataattagggcagctccagacgaactcaccgagtccaaatctaggaattgggattgaacatggggcatttcaacggtcattgagcgaccaaagccaaggctctgattttggtgaatattcccagcgcgagaatcctcagtcacccaaagaagataagctgatcgttcgtagatgagcttcagaccagccaacgcctctgcggtcatgttcttgaagacaggctcgtctagatccgaaagattcagcgtaaagtatccggaggaagtgggtgctttgctgagatcttgcagacagtctataaccgatacatgatcgaaacgggatttaagatgataaagaatttccttgcgcacgttatgcactgcatctgaggcgccgccaacgactagaatatccgttttggaatctaggaactcaccgctagattccaggggatcgcggaggaactggacagtgggatcgatcgcttgggagacgatggcagacgccgggaatggaagtgcatccgcatctggtgtaatactatcaatcccagaaaaaccagtcttgcgcagtaaccgatcccattcgtccgtggtcacgcaaggggagagtacccggccatcgtcagcaccgagccaccagccgggaaacgatccaaatatatatcctagacgtgactgctccaggttggtgacctctagcatgaccaaataccccccgggtttcagcaggcgtcggatgttattcagggtgtgttccaatctcgaagtcgcatgcaggacaaaggatgcaacaatgacgtcgtaggattcttcatggaacccttgagaagtaatatccttctctgcgtcgaggactttgaagagcatctggccggaatggctagagaacagttccctggcattctcaaagaacccgttggatatatcagtgaatgtatagctagaaaagctacgaccaacggtgctgatgactttcttcgtcgcactaccggtaccagcacctacaagtaatccattaatttagtaaagtctctcgttgacgatcgtgcgggaatgtacgtaccgatttcaaggattctcatgtggggataacgatgcacaatctgagctactacaccagcaaggtaatcactgaagtagccaattcccatggcttcttcatagtatctactcaggaggttgtcctttgtgagatactccaggatggtggattgaccctcgatgactttcgccatgtgttccccaatgatctgcatcacagcaagatcgacattgtcggggaacctaaaaactccttagcaaaagaaaaatatcgtttagtgaaacatgaccgacctttggctttcacgcataattacggcgtgagtatcatggatccagctccgttgagcgtaacggtgccgatcattctcaaccaagccagaaacatgggatgcaaatcgaagcaggccgaggtagggaccctcgtgacgagcttggtgagtggcgggaaatttaagatggagttggcggagatagaatattgacactctttccaggacataggcgagctcatagtcctcgttggtggctttcccagcaaaggtcaccgactctgtatctggcgatgaagggctccagaccattgagctgaaaaatggccgatcactggcagcgctagcagcttcaagaggcacagcatgtatgccttccatgcgggcaagcgtgtgctgaccatccggagagtagatatcaacatcacccaaggtgtcagaagcctccatttgagttaacacagcatcaagctggaaagcagtctgcacaattgggtcatatgagacacacaagcttggattcacagccacccgccggatcaccttgggaacttgaagacaccacaattgcccatcaccggggaagcttttggcaagcaaaacggcctgaatggacgcatctagcatggccgggtgcaaggtcagagaggctgaatcgggggtaggttctcggttgacaaaacctgtcgcgatacccagtttcctcttcatgtcggttagcgctcggaatgggcccgtatagctgtatccgatagggtccagcgagttgtaaaacctttcactaggaacatcaatcatatcgacaagggatggtcgccgcaccggtagcgcatctggagtgggggtgccgtaggtgattatgagacgtcctgaagcgttcatggtcatggcggtcgactcctgcccgacggcagagtagaaggcgaagttggccagcaccgtgtccttctgtttgtggatgatatttgtgatagaaacaagcgtctccacggatgaactttcattgtcgaagatcatcgcctggcggatgactaggtcctccaactcgaccagccgaatagtctcgttgggcgccatattcttcgctgcttccaccgccgaagatacatagccagccccagggaaaaccatctgtccctgaatctgatggcctgagagccaagggacctcacgggggctcaagaaattccgccagcggaattcttgctccactccatccgggcaccgagagcccaggaggggatggactggagtcgatctactcctggtcgccttccatagccgcgattcgtaccagaatatgcgatcatggtcccaagcgtacgaaggcatgtctttgacaatttgcggttgagacccatccgatagtagcgcatcgtacctacacagatccacactggacggcggcagcgtctgccataggtatcctaggcaaccactcatcgcttcgagatcatgggagcctcgctgcaacgtccctgtgtagtccaaggacgcgtcaagcaagtcttgtattatctgcaaagttgggccacgcagggcaggatgaggtcccacttcaattgctaaagtaaacgggccatggccagcggtggcgctttcaaccgcttgagcaaagaggactgggtggaccatgttatcgctccagtatgtgtctgcaagatcgagcgctcctgcgactgttatgttcccttcccgcacgctggagtaccagacgggggctgagggtggcggatggccgattttgatattcaagtttttcaaggaggaaatatattgatcggagcaggctctcatgtggtgggagtgataggccttgtccacggccaatatgcgaacgaactttttctcttcatcaaaaacggctttggcttgctcaattgcttcggcatcaccggacagtgtgacactggccgaggaattgactgcggccaccgaaatccgtccgtggaactcaggctccttgcagagctcaagagcatcttcaagggaggttccgacggccatcatggctcctttctgtccatcggggcctcgagccgaccgagagcacaacccacgatagtaggctatacagatggcatcgtctgcggagaaaaacccggctgcataggccgcagcaatctccccggaggagtggccaactaccgaatccaaggtgacaccagcaccacgcagcagctgcactaggataatttgcaccgccgtgcacattggctgggagatctcggcctccttgatgcgcgacgccaacgcatcggtcataaactccttcaacaaagtccatctcgggcggtcgttgcttggaagacgttggagagcaagatccaagccctgcacaatctctcggaccttggccgacttcagtaactcgcgtcccatcgtggcccactgggcaccttggcctgtgaagactccgagtactcgagggttctccgtttgagactggtggtgtctcacagcgaggggggctttagcgtctgtttcctcaaggcgggcttgaatgttggccagtaggcgttctgtcgttgcaccagcgacaatcgtggagaaagcgagacgagatctgcgcgagtacagcgtccaggaaacatctcggatattcaccgcggggttttcctggagatattccgcgaacgatgtcaaatttcgggtgagagaggcctcagaagtggcagagaggatgaatggcgtgaagttgacctgatctcgatcccgcgggacgacaggacgctcatatgcctccaagattgcatgcgcattggttcctccaaagccgaaactgtttacactcgcccggcgcggtacacccgacggcagtactggccagggcttcgccgttgtagttatctccaggttggtgtaaaagggttcgatcttggggttgagttgattgaaaagaagattcgggggaatagtgcgattttgaagagctaatgatgccttcaacacaccggctagacctgccgttccttctgtgtggccgaccactgtcttgatagaaccgacgtagagtcgatcattttcttctcctcttgcaggaaaaaaagcattgctaatggcggctgcctccagggggtcgcccgtcggtgtccccgttcctgataatgttcattagccgggatgattcgacagcttatccgtatccttaagagcaaaacttaccatgcgcttcaaagaattggcagcggtcttctttcttttggggatctagtcccacgttggcgtaagtggcacggatcaatgctgtctgtgccgtagagctgggcatagtaatgccattggtgcgaccatcttggttcacgcccgtctccttaataagacactcaatgtgatcgccatcttccaaagcagcactcaaggttttgagcactacaacggcgacaccttctccacgagcatatccatccgccttggcatcccacatacgacttcttccggttggggaaagcatttgaagtttactctccgcaatatacggctctggcactagacagaggtttgacccagcagctacagcaaccctagagcggccggcacgaagtgtttgcacagcttcatggaccgctaccagactagacgaacatgccgtgtcaatcgtcatagacggcccatgccagtcaaagaaataagagatccggttcgagatgatgcttcgagcggttccggtggaagtgtacatggggaaggattcaggatcccggccgatcatatcggcatagtccccccacatcaacccgacatagactgctgtttctgaaccccggaggtcctccagccgcaaaccagcggagtcaaccgattcatagactgtctcgaggagtaggcgatgctgagggtcaatacaattggcttcggcaggcttgattccaaaaaattgcgcgtcaaaaacacggtagtcctcctccagtaggtaggaatggcgaacattgctggtgccatgatgaagattgtctgggtggtagaagccatcaggattgaaacggttgggtggaatttcggtctgtaggtcttttggctcccgtagcagctcccagagctttgacggcgaattgctctgcccagggaatctgcagccactgccaacgatggctatcggctcaggaaggctgcacagtggtggcatggtctcgcaagggcagtgcagtgatgcgggatgtttgagaactggcgatgataaccgtccgacaatgatcttgagaggttttccattattactcctttcatggtgggttttgttgactctatcccagagctatccggcatgtgctcggaggatgtattcggagtgggcccccgagtagtcggtcatttggcgtcggaggtcgcgttaggctgggagttgattcgctaggtggtcgacgatgtggggctaaccgatatacggagtactccgtacggagtagtgtatgcttgaattctcagtccgtatatagtcccaaagaccagagaacactaatctatagctgccatttcgatcaaagcaagaaggggtcgagcaactcccagtttttgtgtatgaacgcatatcaatcaagcccaatggatggcagtatacaacataggaacctagttcaaggggcaaagtagatggaatggaatagcttcaatattacccgcgaccttcgtacacgggcgatttgaacggtcggtataacttcaatgctggatatggtcaaggcctaaaaagtaccgtttgggggtgggaatagcttgaaattcatggatgggtggtattgtgcggtatcgaaggcggtctaaaattggtgagctagtcccaattaagctataaaaccattaaaatctgacatccaaatctcgatataacgacatttgtatgaggagaagagtgaattaacgaactgtgtaataagaagggaaattcgttataggcttttactgtatactgaagagggatattcacgatggacaatctggcctagcagacaagacgagagcgacacaacaacaccaactatccaatgagatcagctagcacatacagaccgtatgtagtagacatccttctatcctaattcaactacatcctgtgaaccccttttcattctgtgtgtggtgcataatctatcttctctccgctgggattttatctgacatgagagctccaagattttctctctgtctgaaaagcaaggccaatagttgatgattccgggtttccccactgcgataactaatttaaacaagaaactgaccgttacaaatatgacatgtttttactttatttcctccattgaaattgtctttcctaaccagtgaaaaaaaactcatggtccaaagacaagcgcagaggtctcaatactccagcgatctggggcgttcggcggcgtccgaggatccttgaaagcgacatggaccgcgcgccctcccttgaccccactgcctggtttcgatccatacgagtcgaagatctgtaacatgatcgcctcgtcagcccctactccggagagatagtaccacttctgatggtctcgatagatgggagcgccaaaatcttccgagaaatccttgagatgggagaccatggtgacaatgtcttcgtccttgacggtggcactcgatgcaatcgcgagcggacaggtgtagacggtgccgtttaggggctgccagaagtgtatcacacggtagcggcccagcagcagcttttcggcctcttcctcgtccaggtgatatctcacgcgatcgaccaccgcatcccccgtatggtccagatgggcaatcaatgcgggcggattataaggcacggggaagttcttcgtgtggcggatcccatggcggaagatgtgcaccttggtggcaccggggacgttggccagaatctgctgttctactagtggatagtagttcttccggatgtcctcctcgttgtcgaaattggtcttggagatggggacgccctgaacaatatggatggaatcgtggtcgagattgacagaggactccttgccgcgcaggtcttgaacagtcaccatgctcggttcgccgcgaatgttggtataagggactccctctggagggggacacttgatgtacatataaggtgtttcatcgggagggaactgccggctaaataaaagcggagtggtgatgtctcctcgagggggtggtggtagagcaccttgattctgcgcggagactgggggtgtcttagtggtagtcatactatggaccgttgcgtctttccaaagatcgttgccagtaccggaagccttgaatagatctgcggggagtgtctggtgagaaatatatggagtatattttccaggatcggctctgctactgctactccacaagcactatttccagcaaacttcctgaactcgtcggagtcggaatggagtcggacagtcggggttgatggccgatctgaaatcatggctgattttctccctcccagttgaatagccagtctaacaattagttagaacgaattttgcaatatctaccgatgactataccatagattagtatactattatgactatcctattaacatattatatagtaacactatcaattattatggaaaaagaacgggggaataatgtatgtatattcacggctaaagatcggttacttcaactaagtcttcagtggctctgctagttacaatgtttcgcttagaaatcttcagccacacgttcggctgtttggtgatatcgtcgaattccgataccagtggcatcttccagtccgcattcgcgatttctaagttgtagcgcattaccattgcggccaccattccaatcatctgcttctcggcaaatacccgccccggacagtaggttgtaccacctccgaacggcttcgtcgtccgggcatggctttcgccttctccgcccaacgacttctccaagaaccggcgcgcgtggaaggactcggcatccgggtgcagggcctcattgaagtgcatgagaccacatgggatgttgataaccccgcctttctgcacgaaccatttcttcttgccggtgaactgggtatcggcgacgacctcacgcaccgtcagtgagttgttgtgcatgcggagggtttcgtgccagatggagcgcagcagcggcatttttgtcggcaggatctccagcagttccgcagggctgcggtcggaagaatattgcgcgtcggcgagttccttgcggacctcgtcggccaggcccggctcagccagaatatggaggagggcgagataccccgtgggcatagagttgaggagcgaggcaaacatggtccgcagcatatcggcgccttggcactgaggactcatcccggactgggtcaggtagaccgtccgctcgtagagatactgcgagacgtccttgcgtgtttcgatattctccactaggtcggcgtaggtgttgatgatgcggtcccgagcctcgtaggcgtcgcggtagaggaaccgcggcgcgcggaagagcaagccccagaagccgtcgcgcaccatggtagtcaagtcgtccagcaggcccggatgtttttgcaaggtggttgcaccgtacagaacctgcacagtggccttgccctggacgtcgaccacggtctttagaccgggccgcgtgatggtcttcttgggcgctgcgtcgatttcggcgtccaggttccgaagctgctcctcgatccgctgcaaatactgcatcgcgataatgtcgttcttgtccgagagcagccactctaggtccatgcgatgccattcaggcttaatattccacatctggtcggcatccgccgctttgaatccccagatggagatgtagataaaccgaacaaagccgcggatgcttaacgtcttgccgttcttatgaattcccgcaatgtccaccgggtcgctgaatatatagtgtctccgaccccccataggtacactaaaagcttggccttcgaccttgcgactaaagcaatgttgtaagtgggtgttcagcggattggtatctccaacgaagtcatgacaatcgacttacttggcccagcggaagaattcccgcttactttttgcaaaccgaaacgcatgcccaaagaatggcatccagtgcggtatcacttctggctcattgggcagttgctttggcgtgaaagctagcttactgagaatgagaagggcgaccacaccggccgctgccagcacagtagggctgagcatggtgaatgaatttgtataaactttggtttctttttttcgtcgattaaaatatgctgccaatcgtgctattattgttttagggtcggaagagagggcaggattcggacacacacttgctcactctcggaggggatatccgaacatctctccgacaccgatgctgtctgtacatatcaccggacgagaaagacagtcaatgaacaaaggaaaggaaagaattgcaacgacggtggacaggcacaatgctgtcccaatttcgtattaatggcttgagggatggtttatatatggagataacgtcctggactacactcggactgctgttggcatccgtaagtatcataatccggttccatagaagcagtggggggtatgatagctgaaagttagagcggcagataattttcgcgttcaacgtggtccgcactgtctatcgactctggtttcatcctctgtcccggtatccagggcccaagttggccgcggcaactcatctgtggtatgcctaccattggatgggaggaagatatccgttcagtattgaagaggctcaccagaaatatggtctggctcctcggattccatcttctaggttgctgaagcagactgactgactgatcattctaggagacgttgttcggatcgctccaaatgagctgtcattcagcacggcacagagtttccaaggtccgatcaaccaacaaggaaatagataatcgagcaatggacttactgacaggagtgaatatcagatatatatggtcatgccacgtcaaaggaccacaacacattcatcaaaggcaccttctacgagcacccccaaccagaaccgggcatcgtggcggagcgtgaccccgaaaagcaccgggaaacccgcaagctattgtcacatggattcagtgcacgggctcttaagacacaggagtccatcatccatgattatacaaacctctttgtatctcagctgaagaagcacggcaccgaaaatgctttgaacatgcgggaagtaagaggaacccccgatttcttgcgctctaccatttcagacagggtctaatcatggatagtggttcaattatttgagttttgatatcattggcgaacttgccttcgcggaaccttttggagctgtcaagtctggtgaggagcagaaatatattcctcttttgcctacctacaatgccaactaacgccactagccaaatcgcatttctggattgataccatccatgatgcaggcatcctggtttgtttgtttgagattgggcgtcgccttccgcttctatggcccgttcttctgttcgctctgccggccaatatcaaaaagaaattcgacctgttcctcgaatactcgcgggatctggtccgtgctcgggtcgcccgcaaagatacggtaacgcgggaggatttctttgctcggctgctggcggacaaatcggagaataaatctgaagagtggttgatggcacaggccaatgtgctagtcattgccggctcggacacgactgccacggccctggccaccatcacgtactatctggctgcgaaccaagacaaactgtggcatctccagcaggagattcgccgcacctttgaagattcgtcctccattaccagcgactcacttcagggtctgccgtatctcaatgctatcatcgaagaaggactgcgcatctgcccgccgacctcctttgggctaccccggattagccccggtgcattggtagacgggcatatggtacccgccggtgtaagttccatctccattccagatctttatatgcgagggattgttctaaccagccgccaaccagacaacggtgtcgactgcgtcctggaccaccgcccaccgcgaggactacttccgcaatgcacgggactttcatccggaacgctggctcgctaccacgcagccactagcagatgtccgattcaaggaagataaccagacggcgtcgcggccattttcgctgggggcacgaggctgtctcggcgtaaacttggcgtacatggaaacccgaatgacgctggccaagctagcatggcattttgatatggacttggtgaatcaatccagcctggattgggagagagacttgagatttgaagggttttggaaattgcccacacccgaggtgcgattcatcccagtggagaggtgagaagcgtctagtttatacaagagcggtgtcgaaagcggtatagattaaggcaccctaaggcatcctcagacatattaaggcatcaaccctcccaaataattcaaattgacccctgagcgctatacaccttcgcataggatggcgactagacagtagttttgaagatcatatatagaacttgtactaggtatagatatgccttgctcatctacatactcacatcccatctccccaaaacttttgctcggaattgatagtaccactcgcagacgatcacatacagtttcggcaccgtcaatgactcgacatccacatgttcaatgaaaaaaacgccctcgtacggctcctcgccgtcctctccccctttgacccgcccaacatacgcactgcctcccgccccgccaccaaggtcgaatgcaaactcctggttacgatactccaaagtgaacgaccacttcttccccactgacggcgagatcagctcgatctcgtaccctaccggatcatgcatacttcccccgtccctcggggctggagcagaccggtagagaatgtggttgtccgtctcggagaccgaattgcgttgcgcagaaaatacattgaccccgtgcttggtcagaaagggcgacggatacgagacgccatttaaccgggaggttggctgccaaaagctcagagagtatggcccagctgtgagtcggacggcttcccattttgtcaggatttctagccatccttttcccgaccaccagcggtcatggccccccaagccggtccatcggaacgcacttccctgaatagtcaggtcaacttcgatcccgccggctggtatgggttcgccccagtggagcattggcgcattccaggtcgatgcgaccttgtccgaaacgagtgcgccattcggatacctggacggggtggtggagtgaatagcaaaggagccggttacttccttagtgtggatgtggactctggcgtgcttggaatcccgcgtcgcctggaagacgtaatactcgtctatggcgctggcccagatcccgaccacctggttctcacagacatgcacgacggaccgggcgaggtaatcgaccgtggagaaggtggtcccgttgtcccagaccacgtcgagcgacactcgaaagttgccggggccaaggaatgcataagatgcatcacggtagatgccaagcagcagcccgctgcgaccggatgccgacgtcccatcaaaggcccattgctcaccggcggtccggttgagagcggagaattttggtgcatcgaacgggtccaatggggaggtggataagaggatggacggattagccgtctcgaatgccgtcagatggctggtttgacatgtagtgggcagatcaagctgttgttcgatcgtttggatatatttcccctcatcgccgacgtttttgaggtcgaattcccgtgccagtaaaaaggcaagaagaagaacgggcaacgtgatggacagaaattccaacctgattctcgccatcctgatggtaatgactatgattctcaatggccggtcaacaggcaatacaaatcataatatcgttgttgacgcccaggtgaggtctagattggtggttttcgctgagccgaatcctcgccgaacgccctcccgaggccgacaatccgagtccgaccttgcgcagatgaacacaaagacgaatgtctacatgtattattatggtaattgtcatgtctgtcatttctcctgatggagagattccgagagtgagagttcgacgttccggtctattccagacacactgcaacaatgactcgtcttcaccaacaccgtctgccgaccggattctcgccagaatgggtctccttgccagcccatcagacggtcatagcacagggcgatcaagggatacccgtcatctgtgatgatgccccaatccctactccagaagcacacatggtgctggtgagaacgggcgcggtgtccatcaacccgtgcgactggaagatgtcatctcgatttcccagtcctggcgctcgcattggctgtgatttttctggagtcgtgctatccatcggccccgacgcagccaagctaaggcccgatcttcaggtgggtgatcgtgtttgtggaggtgtgcatggttccaacccgatcgatctgccatccggtacctttgccgagtacatcgtcgcccatgccgatctactcttaaagcttcctgaacggatctccttcgcgcagggagcggtactcggtgggagtgtctttgcgacgctctggatagcattttatgactccctggggctcacgggcactccggacgcgccgattgaaggcgacgtaccgcccctgctagtgtatggaggtagcacctccaccggtacagccgccttgcagcttcttcgcgcgtatgtatccattccatggggggaagccacaggtttcgacgcgatggactgaccttccgatccagatccggatacaaacccatcacgacatgttccccgcacagctatgccttggtcaaggagtacggcgcagaagaatcgtttgattatcattccgagacctgtgctgtggatatcaaagcctacacaaaaggccgactgcgtcatgttctcgacatcatcacggatgtgccctcgcagctgatctgctacgagacctttggccgcgtcggaggaaaatacacctgcttggagaagccctccgaagagctccatctgcggccgacggtgaaaaaagaaatgattgtaggattggctgctagtggcaaagaaatcgcactagcggatggctacgaacgaccggcgaatcctcgcctccgagccgaaagtgctcatttcttccaatccgtccaacgtctgttggatcaaggacgcttcaagccccatcctgtccggcttctgccaggtcgatttgcgggtattctcgaggggctagaaattctccggtccaaaaagacatccggggaaaagttggtcgtgctcatcaacgattcttatacttaggttggaatatcatcgcaatatatattcttattattatagaaaatttctatgccccacttccgcttataaatccgcaaaatcaaaattcccaagtgttccccagcttgaggttgatcgctctcacaatttgagcgagggactttttcatgtttcccacatcaccaccaccgcccgcctcgggcacatctaacacaatatcaaatagtctccgcgtaaggccgccgtgcatatcgagccggatcgcacacatacactcatcaatttgtctaataagatgcgcgctcgcctggagcaggatccggatctgaagatcccgtcgttgcgcaacatccaacccgtcgatgtggatgctgggcagcgtgggaaggaagttggattccaccatggtggctgtctccgcaatagagtcccgtatcagcgagaagacttcccggtagacgcgcagaaggctgatataacaggtcagcatgagcatggtcaggatcggatccacggtctcggactcgtctgaagaacgcttggacggatgactagacgcggtgggagaagttggagcaggagccggggagccgtcactcgtgttacgcgaactcggcgtcggcgcatgccgatccgtcagggaggccggcgagaggcctcggttagtttctcgtgaaggttggtctgtcccacttcggctgcggggtcgcgagagtttaaactctcggagggtgcggagcagctcttcggagctgttgagcatatgttcaatcagatactggtgtgatccggtctcgctagtattcatggtcgtctgctggcgagtggtagcgaagagaagtgtgccggccacttttccagagtcaagaagagtcaagtcttggagaagacccgcactgatatccgacagtctttcgttccagttctcgttgggctttggggcacagtttatccggccctggttgttggatttacgccggcgcgaacagggtagagagtgataggcgcttactggggggactgcctcctcgcgcaatggcagaggggcgggatcatggctgtccagtccgagagtcgtcgtcgggttgtttctttcttcctgctcgtcattgttctgcgcccaggaagcgtccgcgtcgataaaggcctgggtgaagtctagtaaatccgagcctggaaagcccgagatggcggcatccatcgagatatcgccgtacgtctggtattcggggtcggagattggacgctcggggctggtatctgtgccgagatggggtagctgggagtccgagtcgaggattaagatagggcttggtgatactgtggccattcgatggtcggggccaaagacggatgaactcatgcggttgggcctgttcgaaggtagcgaggcgttggccattgagggtctcgctttggtgatgcggtgggaaaatgttgtcacacagcgggcgccgaccttgaggcaccgacggcaagagtcctcgatgctcgaattgggtgagagacgctcacaacgcagcttctgacctcgacagcggtcacaagcagatcgacgaggctgttcgacttgtggggattcgtggcgggtgctatccatactggacagtctatcaacgatattctgcgtgccagcaaatgtctccctagacgtatctttatttctcgttttcttcagtactttttccctcttttacaactttctctttactccactttaccacggttactgttcgccgcccactatcagcagggcgatttagggtcacctatcggatcgggcttcatgaacactctatgccaaaagaagtatatgaactagctatcttccaggtctagttgcgcgtgagaaaataggccgtgcatctcaaagagccacgctagcatacttactcgtagcgaaatttaacatgctagccagtcacattatactatgaatttctggtgcctccagccccacttaaactacccctcaatgaagctgagacataagctacagatccctataggcgaataagataatagactatagcgggatgcagaggtctactaaaagaacgagtctcatgcggccggaatagcctatggctccgcttcaccgggttagccgcaataccgagcttacttacattcactagtccatacaaaatgagtcataagaccctgtctaactcttagttatccgtgtctctatgttatttgccagtcgttacgagagcggaaggtgtattcgaacggagtaatcagtacaatgagaagaaaagaaaagaaaagaaagaaaaactagcggatggtctcgattgcatgggttttaactttgtgggcgttcttaccaagccatgcagatgagtgcgccagtacggaggatgggaggaatggttccctccaagactgtccagatcgtcatctatcgttatcatttaacaattcaacccgctgcaactgacccactatatataactcgggataatcgtacataccacgtcaacgcagatgtgatagagcaaatcacgttctctattacttagatcagattcggccccatggggcaggtcccactttgttctggatgtcgcccggtatggggccgcgggccggcccctaatattctgccgggaagattggtcagtcaaccattaggaactaattcatatgctgttccgcggccgtaactaactaatgagtatacaacaattttcattttctctaatcatttacttttctacagccgcatttagttcaatttctagcgactttataaatttcaaactaaatgtaaccacaagctgacaggcaagcacggagtaagcaagtacagtggtgttccatgagtatttgaccttgggtacttcggccttgggcccacttcgtaggcccacttttaatattgcccagcagaaacctcggaaattcaatccaatttaatagctggtatgccaaccttcatatttgttggacatggtggtcacctgaacatcagccctgttcgggattgacaaccccatttcggggtttgggtcccgcccacgggtctagaaagggtacttcaagaaatacatacaggatatctcgaccacatcattcaattttaggaaggtaaactaatatcgcgaagttaatctaaaggcagttgggccgtacattcggccgagttactaaagaaggaagtaagcaagtcagtaagcccgggctctaatgaggtacaacaacccaaaaggtttgttgaatgggagaaaagggccaggttagtagactacctacattaggtcctatattttgtgttttttttttaatcgtgaactctgcagttttccgtttatcggatttgtggctttcaccgaatttgaaagaggtgtctgattgaaatatataccgcctcaatgggtggtgattgtaattttatatataactcaattgtgacgatccggtcaacaaaggaaagagcaggacttgatcacagctgctatgtatggaaggaatctttccttcccaaatagaagcaagcgtaagcgattcagatgtccatttgcatgggacgtccgcataagactatacaacaggctgtcctttctctgctctgtactcaacatctcgtctgaatgcaccttacatctctgtaaagtctggcctgtgacatcaatgacaaaacccgcaattttaataagatgcttgtaatagaatatacttcgtttcgggtaacttccgaaccacggagtaatcaccgcctacaggctactccgaacatcccgtgtgtaacattacagcctcttcttctctaacaattgtcattcaattgcacgaacagcccatcgtccttatgacaagtacggagtacataacgcctgatcgccacttattaccgccttcttaaggctaaagttagttacctagttacaatttagtcattctcattcatatttcaccacatgttggggtgggttaaatgaagcctttggcgccataaatttagggacttgttgcatgcctagatttctagtatcgccttcctgatcgggtacttctggtttacatagtatgaattttgattaaaaaaattctatattctacctgattcctataggattcaaccccttggttggtgaaacagttgatacaagatatgacaggagtgacttatttttgttaagggtttacacacaaactgtaggtacctgctgtcttgctactatcacatgcagtttattactgtcagaatctaggataaatactgtcatttttcatccctgatacagttaggtcacatgactgaccaggctggtttttctgcagaaaaaccaactcagatggtttttcgcccgaaaaatatcctttcattttgttttgtttgttttgattactaagttgtccatcagattgtcatgttttaggactattgtcagttttagagagttagagaatttattaagatttttctgccacaaaatacactcgccttaccaccgtttttccgtcaaatacaaaagggtgtacagattaagacgcggcgaggagagcggtaggcagaagcaagtgaggcaggtgctcaacccaattgggaaggcggtactgaaaattcacgcaatgcgagcaacaattccctaattatcatttttccagatggtttactagctctgtctgtcatatatgaacatgaaggaacgccgttgcaggccctcctgataggcggggaggaggggaaattaaaatcgaacaggatacattctacactcccacgaggaaggctcttcccaatcgctgcacatcagctctcaacaacccttgacggtgacattccgccccaaacaagtcttcaatctcagaccgtaaatcgagcatcaagaccttgttgtctaacatccgctccagacagcgaagcactaagcttttgaccacatcaatgattgtggtgggcaaggcatcggtgtcatactcatatcgaattcttaacgcaatcatcggcctgccattcgaagagacatgagaacttcgagccttctgtggaaatttgaactggctttacccccttgacaggaaagggattttcgacgttaccatgtgtccgttggtcgtggaaagtgaccacgcaatcgaataaaggttgttgttgtctttgcctaagaatttgatggcttgggaatggtagtcctaggtgattcagcagcgaagaccagggaatggcatttgccagcgcagactgagatgacgatcgaacttcttcaagagcgttctcagttgtagaatccgctttttctagcagtattctaactggcaaaggctgaagaaacaagccgaccacttccatatcccttgtgttagatcggttcatgtatggagacccgaggagtacatcatgtcggccacagatagtctgaagaacgatacccactactgccaagccaaattgatgcagtgtgattcctttgagggaagaggtagcgagaaggcttttgtataatggaggcggaatcgtctggaacacggattctccgtggtaggatctgcacgatggatcctcagttggagaatctggagcccgaccgtctgtgataggaaggcccttcagataggtactccaaaaggacaatctatcactgccaacgggttggttccagactgtgcagtcgaagtactcgcgcctgacgggctccaattttcgaccgtagtatacagcagcagtttcgcgcaagatcacattgaatgaagtcaagtcacacacaacatgcgaggcgcaaatgacgaactgattttgggaaaccacggcgcggatcgggctttctttgtcaagattgaagggagtgttgatataatgtccgacgtcaactttccgtacgacaggcacgatgattgactcgcctgtgattgaacgaagcgtcttatccccccccccggcttgtaaacctggaacgcaaaattcgatggcgattaaacactatctggaatgcagaagccagcttttggatgtcaacatcagtcgagagctccgcaaagtaaggtacattgaagctcgttgttgtctctgaatgttggtaacgatgtatccactcgatctctgtcgatgaaggagtttctagaccaagtggctggacttgagcttctggtgatgccagtggtgtgccatgtacctgtgactcgccctgagtctgaataagacgggctagatctcggagcgttgatgcggagataatatctttgacggtaattgggatgttgaaaaggctcttgatgcgagcagctagagcaagttggaggagagaatgaccaccgaggacggcaaaatcatctgcgcttgatatttgcctcttggagtccaacgtcaacaattgtctccagatgcctgcaagtgtctcttctagagaattcaggggctgacttgacttgggaaccagtttgacgtgattgttcgagacaagacccttgatatcaaatttaccatttttggttaggggcagctttgtcatggagtaaacgcttttcggggccgaatgaggtggcagtgccacggccagctggcgtctcagtagctctgtatcgatttctggctcaacccagagcacaacagcgccgttctctgtgactgcgacggctttggagaccgagcacatcgtccgataaaccactgctgggatgtcgtccaagttaatacggtatcctcgaagtttgacctgccgatcatctctactacagcaatgcaggttgccatgctcatccaaaaagccaatgtccccggagcgatacatcatttcttggtcaaagccctcgcaaaatggatcaggtacaatttcttctgtcgtcttcttttcaattccaagatacccgcgggatatctgaaccccggcgatatatatttcaccgatcgtcagcataggttgattattcaaattgatcgatagaatgggccataatacctctgtgggcccataaatattataaagctctctgtccgaagcccatcgttcgaccaacgcatctggcacaggttctccgccgaagtgaatctttgtgatagtcagaaaattgaaatatactataaagttatgatgtgcaaacggataccataccgatttcaagttaggatagtctcgtgggtccagttctccagccagggaaggggtgagtgttgctacatccacatctgacaggtgagagaatttatcgtcctttcctcggggtagtaccaaagtacccccagaacagacggtcgagagaatctcgtggatacagccatcgaatcctggagaaagcatctgaccaattcgtgtgctgggacggcttgtgggtcgagcggacacggaggaatatagggcgacaacgccccgatgcctacacagcactcctatgccaagtcaataattccacgctatgttaaatattcccgaagacgcacctttgggctggccagtggacccagaagtgaaacaaagataagccgtagagctaggctgtggtaacctaggttggaaatccgctggcttgatgtttttgttcagaatatggtctatcgctagtgtgagtggaccatttggccctgtcttttccatttgcgaagtattgggaagcagtagaacctgggcaccgctgcgttcaaggagctgagcacgatattcctcagggtacgatgcgtccaccggacaataaaccgtgttggcttgcattgcggcgagcattccgacaatccagttgctggatcggtctgccaaaactgcaatgactgcaccagcggggacgagcaaagtgataacgcttgtaattttgtccacacgttcagccaattgagtatatgtcaaagccttctctcctgcttgaatggagatttctgaagcattgtgccacgttgaatattggaacagactgctgatagtttgacccgaattgcatgtaaagctggaagtcgagttactgtttccggctgtcaatatcttctcgcgcatgtgcgcggggaatttcaggccgagacactgctgcacagagaaccggctgcgaatcagggagtgtaagatgctatcatagatatctgccatgtcttgcacctgagttagtgagaacatatcggtcctatagaagaggcgaataccctcatctgggtcgatcactaggttgagaggaatgtctgcagtattttggaatgacggatcttggaggcactttacggctgttgttcctctcctcagcccaccatcttgaacagcaactgtggtggagaatgctggtatgtttgatggaacttccgaaacgtgtatgctagccaggccttggatttcacgatgaatctgctgcaaaaacttttcagtagatgaggacctgtcaacccgaacaaggacaggcaacgtttgaatcaacgggcctatcatggtgtctgcccatgagaaaggaagattgcggcctgagaagacacttccgtacacgattgtgtccgaattggtgtaggttgtgagcagcagtatccatgccgcattaaatatggccgctggggtgacattcacagcgcaggcgtattctacgacttttgcccgatctacactctcatatacagaaatctgagcgtggcctggttgacgggggctaagcaaactagcgtttggagatgctatgtcgccgcacgcatcaggtatgagtggctcacgatcactccaatgttcttggatctctgtacgtgtttcacgacgtagctgctccatatcccttgctgcgatagtgaacgggagagagctctcaaagggtctgccttcaagagcagcatccactttctggaaaatcaaggaggctgaaaatccgtcgactaaggcatgatgtacggtccacattactgtgctttggcctctgttgagcccactaccttcgtagtggaaaacagtggaaaaccgcaaaattactgcccaggtcggcacggctgattaattcctggaacgccacgtcgacatcatgttgagatttcaccgttgtttcttcccaagcaaacgaagcttgtggctgcacaatctgcatgggttcctctgttgaccagctgaaagacgtacgaaacatgggctcaactgagacgacagcctcccatgcctttttgacccggtggatatcagctgtagcataatgagaaagttgttgcacatagttcatctggtgattgtccatggtagctaagaggagggccttttgaaggggtgtgatctttgatttcttccggcactgtagactggtctcttgcgtggagacatgagatctctgcccgtcacaccgacctatcaacgcttggatagatggctccaagaggatgtcgcgcacgggaactgtaaacccgtactggcgacataacgaggataccttgatagcagccaaggagttgattccatagctgattgctgattgattgacgtcaatttgatcaattaaaatatccgctacttgagataaagctgtcataacagcttcactcagtgtcgaggtagcagatattggatcctctattgttgagccaatggattccttgatgatagctttcaatgccttgaaatcagtcttgccgttcatcatcggaagagattccaggacgaggatgtggtccgggaccatgtagactggggcattcatcttccacctggctagtagactagttgtgtcgatggtacctgaaccaacaatggagactaggtgaccgttcaagaggagtgagaacgaaaagcttagacgattgttaagctgcagaaccttggcatcaacatcctgtgcgaggttgacgagaaatccacggattggacccccattattaaacatacggtttactccgacaatggcttgatctcgtagagaatctatccttcttccattctctctcttcgctccaagagcaatgtcataattggcatcgaaatttggcttaacagttgggtactatttcaatcacagacgtgagcatcatcaaagcatatcagatttttccctctggagggcctctccatccagaacgtcttaaccaatcttcgaaagaactagctcgtaggtggagttcctcccaggaagagtcttcggctggatcaagagccccgtagcaaatcttgtcctcgggcgctatcgagatccattccatcatttggcgaatatcctccttgaatccaactcctaccgctctggacgccaaatcagcccattcatccatcgagattggggaataaatcgctggctggccagtgacgcgcgtaaaggtggatgcaaattcgcccatccgtaatttcggactgcaaacgacgtaatttttgttctttgttttcgcaatgcctaaagcgaatacctctaagagaaactcttagccttgcacttctcattggccataagtaacttctctccagtatccctttgcaaggcgtgggatatcccaccaagtctcccttggtagaagagactacaaaagattcgatatcacaacttacctgcagcaaaaatacccatatcatgtacaggatcaacccactgaactaattttgtaggcggaatcgggggacaaaaacgaaccaccccatttgctacactagttagaaatattttccacgggaaactctctatcagaactgaccttctcttcgacagtactgcggacgatccaggttggtgaagaagagaccttcgagaatggttggttaaaatccacaggaacgcctggcgtcagcagggagactaaccaggaagaaggcaagtgaccgcaggcaggtcttgctttgcccactgctcaatgataaacttatgatccatgtggaaaagtttgtcaaagcgaccagaagtcgctcgtctcatgtctggcaagctactaaaaacaaagtgctgaatgcggcaaatcttcgcggcggaaatgatattcttcccactttcgagctccagctttaggtcatcctcgttttcgaccgttcttgaattaatctcgttcgtcaccgcaaacacaccgtaagccccagagaaagcgttctgaagactttctatatcgaaaatatctgcggaagtaaggctaagacggtgatcggaggtttgaaaatcattcaaaagacattgagctgaaacggaattgacatccctagtgactgcgcggacatgccacaattctcgcgaatcgtcacttaaaagcgaactcactacgcctttgccttggtgtcctgtagacccaagcacgacgatgatgcggttctgcgtgttggtcatttcgattcaacaggaaagtaagcaaccttgcgtggccgggaggggagatagttctgaatgagaaggaaattaatgagatgaacaggcggctccaggagaattaatatacctagctcttttcccagtttcactctcgatacattacaaattcagggctggctgacttcgtgagcggatgaaccatctttccgtaccggagacttatgcttatgatatccaacgtcagggtgggtatgccccacaaaacggaagttatcagaattaggtatcttttgtatggcccactcatataaaaggtacatatacctaacagacccatacctagaacagctatagtgaaacgaggatgaaacaggatgaccaatcctacagaaaagtgcatgttgttataatattcataataaatagtggaactgcttcccttgtaccttaggaattcgtcttcgtctcccactgtgagccaagagactgctccaagcccttgaagtcgttcaccctgtgctttcctttcgtgggaacgttgacggggacatattccttatggaacaatatagcttcaacagcaatgggaaactcctcgtatgcagaggactggcaatcgtgctcaaggattcacgttggccgtggagtcttcatcaggtccgggttcttttttattgcgtcccaatctggttggtgacatgaatcgtggttctccttgccacctgtttggatcagagtggcttgtttatgcctgtccgaaaatattagtgaccttaaggatgtgtcggatgtatcaacctgatcttttccgcagcctgtaagccgaggggcacgctgttcttccctgcaagctctagagaaattgccaacgcagccgcattctcaatagcctgactagcaccttgtccagccataggaagataggggtgggcagcatctcctaccaagagaactcgccctgcgggagatagccatgtctcaaggggaggcctagtgaggagggggaaattgatcgccttcccgggcggtgtccgcttgattattggggcaatctggtcccagcaaggccagtccttgatctggtcaagcacatcctgaacattagccggagctgtccaggactcgcgagcattgcccttggggtccggatgggtaaagattcacatcacagccttgcccagcttcacagtgcacatggtgaactcgcaccccttgcccgcgaatgctaacgcctggtcagtttttcctgcaccagcaagcaaccagtttgcctcagggtctggggcaatctcgtcggcgtcgaaatatgcccggaatgctgcatattccgaactcacgggcgccggatccttgcccgtcacaaatcctagagctttgctatgcacaccatcgctggcgattacacaatcagccgacaccttctggtcgttgaccaccacgccggccctctagtctgtctcgaagtattctgagactcgcgcactgaactggacttcaatcccaagttctgcgtatgctgataaagaatattcgccaggtcacaccggttcaaaaagaacccatcgccctttcggaacccagatatcgcatttgtcacgatgaaattccccgcatagtcatatatatcgactgctcggacatggctgacctgggcctcgagctgtcggtgaatatgcccatttgtcccccatttggagacaacacgagccgcgttggttccaattccaatgcaatcaccttctttctgattagatgcttttttttaagttttccagattgatatatatcaggattgacataccttgagctcgtggtgaggaggccttttcgataattgtcacctaatgacctttgcgatgacattcaatggctgcagctaatcctccaattcataatccgacaacaataacgtttattccactggatcgaggctcagcaaccgcgtccaggccccgtaccgatgacacagtcatgatgaagtttaatgagcttggaatattcgtggggtagaattagagggcggattttgaatgatttgaatgtgtaatctaagtccatcaaggcacgctaggaacatgcaagggttaacggcttgcatatactgtggtaagtagttacttgcactacgtagtgaacttcattccgattcccaacccgcttctatgtcgtaggcaggttaatcccgcggatatgataagtccacattcaccatagatgttggttgtaaagcatcacaccgccacttttacagtattcttattatggtagactcgtgacaaacggtagcaaactacaataaataaaacgtagcagaccaagtttccatgatgatgcgcaataattcaagctccgtagactgtgacatgtcctcgattcattcgagatgatcgcgataaggcagcatgactaccccctatagtaatgaaccttcggtaggtggctttcaggttgatccctcatttcctgcccagtctctctctcttccctgtacatgctctttaagtatgttatgatcgcgtgatatatactacgtatgagtcacgtggcaatgaccagcatcacgtgataagtattctacgtcaatcacgtgctttaggtattatcacgtaatatactcaaacaaacacaacgcccacgccaagcaaatgaacaaacaaaccgcggcgtagccagtaggccggctgcaggccatctaaggagacgacagtcgacctgacatagcatctcgacaattcttttggcaatgtcaaagtgacaagaatcttggccattgcgtagtttcaggtggtttcagacttgatgaactggcaggatggttgtctcgagggaattttaggatgattgttgaacaaagagagcacatggtgctttggaatcaaaccaaccttcaaacaaaaatactagacaaagggctagccacgcgaattagaaactcggttccaattcattcaaggtaaagtcggtcatgtagcgccataacaaagaggtcaagtccctgcctatcaagagccgcgatgtcaatccctcggcgtattctgggcgatgtaattagctcgagtttatctgcttggtacatcagcattatatcaggttatcttgaatgtgggggccatatagtatagccagtgagatagcaaggtggtggtgttcatgtgaagttgtaaaggcagaaagtcacctgccccgcttctactaatatccctcattagttgaccaagccatggatgattcaaagccagttgatcagatattcactaaagcactaccgaagattgaggtatgattgatgcctcgttcccctcttagatttttctgactcgatcacactacagctgcacgctcatctcagcgggagcatcagtcgccaatgcctgcatgaaatttggaaacgcaaaaaagagcacaatcccaatctaaatgtagaggatccgctggtactgatgcctccgggcaaggtcgattatacactggaaacgtaggtgtctgtgtccacaccgaacgatgctgcaaataattattttccatgctaaccaaggctcaggttcttctccacattctccaagttgacctaccaactctgcaacgacctagaaagcttggtatatgctactaattcggtcctggaggactttcttggagatggagtagtgtatcttgagctacgaaccataccaagagcatctcctggtatcactcgagagcaatacatcagctcagttctagctacaatcgagacattccaaagtaaaacacaacggatgtctgtgtttttaattctagccatcgatcgcggcagcatgacggcagcagaggcggatgagatcgtcaatcttgccatcgaaaacaagtcgcgcggtcttgtgggggtggatatatgcggcaacccaaccaaaggcgatgtcagcatctacaaagaatcaatttcgaacgcaaaagccaacggtctaggaatcaccattcattttgctgagacagcagcttcggcttctgcgagcgagctatcaacccttctttcattccaacccgaccgattaggccatgtcatccatgtgcctgacgaggtcaagaaggagattgcgcggcgcaggctctgtctggaactgtgtatctcttgtaatgtccatgcaaagatggttaacgggggtttcttggatcaccatttcggttattggcgacacgaagactgccctatcgcactctgcgtaagttcttcccactgagatagagttctatttcctctctgactatctatttgcacagaccgacgatgtgggatttttctgtagccccgtctcgaacgagtacttgttggccgcacagcatttcggcttgagtcgtgctgatctcttggaaatgtgcatcaagtctgcaaatgcaatttttgctggcaagtaccacaaagagagaatccaaagtatgctggaaggattcgctactcggtttgactctgcatgagtggttggaactgtatcggcttgttggatgtcgcttttgttattaccagaaaaagatgtctattgattatacgtagaaaacccgtttccaaattcagccgatttttcctactgagaagaatatcgtggagccaactaaatcatgttattctcaacttcagctacgtatgttgaccagttgtggaagctatacccgattaggcatccgatctcagcctcaaatcgttcagcttccatcgctaacctcaattcgttgcccgcctcgtaccgcctccttttcttttcaccttggtgtcataacatttacttaattctttcggacattatactgtttgcagcgtggattcaatctgcctttgctatttaatcccctccgacccccagcatctccacctcgttttatcagctccagttgcaaattcaaaatatctcaacttttttcctcaaaacgtggacgctcctctcacatcactcaaagctttaacataatgacgacaaatggtgctctcccacagacactcaagtctatcactgccacgaaaatcaatgaactctccaagcaacgcgccttatttgatcggcgcaaagccagaatccttgaagttgccaacgaagccccagatctacgcacccgtgctcaggccttgctgtatggactcacacgcctgaaaggataccccaaggatttgcttgacgaacatgacctggatctagatgccgatccctcacctgaggaatcggaagataaagtcattatttggcgagtaggtcgtttgcagccgggagatcatacgagcatacatcgctttcttctccaaagtcgctacgatccttccatctccccggcagctatacaggatcgtgtcgatcaacttgaaaaggagttgcaatacctcgagaaaaagcatgagcacagtgcattttacagcaatttggttactgagtggctgtcggacttggatggaagcatcatttccaaatccacgagctcgggctcgagctccgacaacattgcgcgggcggaaatgcctgagcaacgcgcgacttgggagtccttgacttttactgctgcgacacatgtcaatgaagatgcaattcggtcctatcttgatgatcttttcacacaaaccaacctttctcgacaggcactcatggatctccgagcaagtatccagtcgtttgggacagaattatcctcaaagaataactggttcaatgtagaggaactcaagtgggtctctcgcgcacttctcaagtccgaccttcttagcgatgagaagacatccattctgaaagagttcatgcggaacaacgaggttgcccaggaagtggcagatgtgctcaacatgcgcatttcctcgcttgacagctggacctggagcggagccgcagatggtgtttctgttgagatgcgccgccagctgaatggtaaatatcgatttttcatggacgaagaccttcttgatgcccttctgctacagtacctcgggacaaagtgggctgtgaagctgcgaactgtatttgagacattcctacactcgaacgcctggaagcccttaaatgaggatatcccagacgatcacaaggagatgcgaaagtacttccttggtcgagacgccaacttgggtgctgtcaatctcaacgagattcgaaggatgacatacgccgaccaatatttcatgagccaactacccacatcaaccgccgaaggcgctcgggagtatgatgacaccacgaattccagtccagaaaaccccatggataaaaagcactcccttttgcaccttctgatcacagaatccatcatccataagcgtcagcgcggggactttactgcaatccgatcggactttgagtggtttggcccttcaattccccatgccaccatgctcaccgtgctggagttctttggggtctctgagctgtggatcaagttctttgttgtgttcctagaggccccgctgaagtttgcccaagatggagccgagggctctgttcaaatccgcaagcgtggcgttccaatgagtcatacactgagtgattgcttcggagaatctgttctcttttgtatggactacgcagtcaatcaagctacagacggtgcctttctgtaccggctccatgatgacttctggttctggggggcagagaatacttgcgtcaaggcatggggggcaatggaccagttcactcaggtgatggggttgaagttcaatcaggagaagacgggaactgtgcagatgggcctgaataaaactccaaaagattcagctcttcccaccggtgatatccgctggggcttcctggttttggatgcggagaaagagagatttataatcgatcaaacccaggtcgaccagcacatcgaagagcttttacgacagctttcggcctgcaaaagtgtgttcgcttgggtccaggcatggaacagctacttcggccgcttctttaccaacaactttgcaaagccagccacttgctttggtcgggaccatatcgacatggccatttccaccctgagccgcatcgagcgcacactcttcaacaaaatctcagatgataaaagctcgtcgaatcaaatcagtggtgtcactgactatctacgcactgtgatcgcagatcggttcgatatccatgatcttccagatggattcttctattatcctgttgaactcggcggcctgggtcttctcaatcccttcgtccgacttctcgccatgcgtgagaatatgaaacaaactccccagaagctattccacaaggcctcgctgatggaggagaaggaatacgagggggacaaagaagagttcaaaaggaacggtgctgatgttagcatcccattttcgagcaaatggggggtcgaatccacgtcattcatgtccctggaagactacacccggtatccagaaacatttagctcctcttttgtgcgcgtgtacaggcaactagccgaggttccggatgagatgagtgttgatccgacttggagcttggtaagggagcaaaagtgccttgatcaaaggtcctctgaaggttctataaatgctttctggaatacaatgacgccctattggaaatgggtggcggagttttaccacgaagggatggtccgtacttacggtagcctggatgccgtgaatcgccagtctatgcccctgggtgtcgtgaagacactacgcgagggtaaattcagatggcagggttaatcgagaatccggtttattcagcagagcaaattcatttccgaatataggataaataaaaatcattcacttgctattctaactaaatattgacacatactagttaactagtagttacatcatgaaactagtttgttgcactcctctgttaaacggcaatgtcctgtagaagtgaagaataaaccacacctagagtaacaactcactaattatctcggactatgctcattaattatacttacatagatatacctaaacccagctgtacacattcatttccctgagtttctaccctccactcctggtgatatattgtattcacacccgcagtcgttcaccatcattatgatgtatataaggtttcccgcagtctgggtgctgcccggtttcaagatgtactttacttattgcgatacttgtggcgctctttctatcatcgccgaaatacctttcggcctggcaaccatggatgtagccctaatttacctctattggggaaagtaccttcaactacgatcggaactcgatgtcggctctcaagagggcttagtagctataacggtctatatatacagccatttgaatccagctctctgcttggtttatcttatttcttcatctatcttctctgacacttacatcattcagccctcaggtataaatcgaatccacttcaagtatccctcaactagccctcactatagagtacattcaatactcgattcaccccacgggaacaagaccagaaccaacccttcctcacaaatgaccaagggctatatacaacatcgcacgatggcatatgtgcaaatggacttcaactggctcgatattatttctggggacaacgggagcatagacccaaggtaagcatctatatctatatctcttccgatatacattaaaatgattcacaggaccctcaaagtccatcaggtagttacagcccaccaggacgaaacatttcggtccgaaaaacagccatctccccagccatctccccagtcatcgccccggtcctcctcctccctggacctacgagctctaggtccgttgaagctggaacatgaccctccaatcccgagactaatcagcaagtcatctctccgtcggctgcacaattgtctcaaccaacagggccaaaggcgaagattcatcgagttccgcgtcgaagaagaggacgcggtatcactagtcaggactccgactgacctggagtacgaagattccttcctcccgttctgtggagccttaacgccaccgtacgggagatcctccgaagacacctgtcattcttcatcaccgtcgtcttctcagcctgagcctcagtggttggctcttgtgattgcgcgagttgtatcaagcaaggcccgcaaatcatgtcgggccttgaagaagaagttttctcggtgattccaaggaaagaagattgttacatgatccaaggcagatcatggacccccatgcatattattgtctattatcgctggcgacaaatcaccttgtgccagtaagcaaaatcggggtacttttttgcctttcatccggaattaaatatatatttttcactttcaattatgaaaagatagaatgaagcatatatttgttaaacaagtgtcgttgaagtaagtgggagaagtgtaactagatgatcgaaatgtgtatctaagagcggtcggcccacctgcccctgttatctcggcagagttgcctcttccccataaagccaccgtgaacaactgcggccaggacatcaacaacacccatttccctcgaaccaattcttccacaacagccaacatggatcccttttctgcagagggcggtacgcattccagttctttctacagctccgatcaacgctaacccagcttccccgcagagctcctcaacatccacagcgccttccactcaggccaataccagaatgtgattgacttcgagaccgccgcgctctcccccgagaaccagctccccgctcaagtcctccgactccgcgcccagattgcccttggccaattcgaagaaagcctcgccgagccctccatcgaagaggacagccctgacctctccgccgtcagggccctggcactgcagtcctccggcaaaacagacgctgccctgcagctcgcacaagagctcgcagagaactaccccgaaaacaacacggtgcaggttcttgctgctactgtgctccaggcccagggacacagcgaggaggcgctggcgctgctgtccaagcaccagggtaacctcgaggcgtgagttaccccgttgcaagtaggccgcgaatataacggagcatgttggtctgacattctatttctcctagcgtctccctcattgtccagatccatctcgtacaaaaccggaccgatctcgcgctcaaggaggttcaggctgccaagcgctggggtcaggattcgctgctggtcaacgttgccgagtcgtgggttggcttgagagttgtatgttgatgataaattcataatcttctggttgatggttgatggtctatgagtgctgatttgtgtttctgtacagggcggcgacaagtaccagtctgctttctacgtcttcgaggagctcgcatccgcacccggtacctccgcaccgctatctatcgttggtcaggccatcgctgagatccacctgggtcgtcttcctgaggctgaggctgccctcaccgctgcccttgagacataccctaccgacgtggagttgattgccaatagcattgttttgaatgtgttggctggcaagcagaccgaggacctggagtcgtatgtcatcctatcggagaagaagatagtgaactcgatgctaacttttatctcgtctagccggctacagcaggtccagcccgcgcacccccttctcaccgatatccaggagaagagcgagtttttcgatactgcggcggcaaagttctctgctaaggtctcatcgtagaaatatttcaatgctgttccctatatttgttatgtttaatccgagtcaggggagcttatcctacttgtttatgagagacacgacctatctcaatattgcaactggtgtcatatttggatatctcatctgtaatttggtacaagagataggaacaatacaaatctgtttctatcacagccgagaagccaaccattctcgcaacgccgaatgagtcggagtctcctccttcatcatagtgaaaaacggcgcatcatgcgactcatcctgcccaatcacaaaggtaatgtctttgaactccgccttgaccttcttcgcaaactcccgaataggcgaaagcaaaagctcatcctcaccaacaagaatcaaaatcctctccgtcttagcactctcccaccaaccagggggtgcatcaaacggctggttccaattatcctccggcagaccggcacggtaagaaatagtccacctctccaaagcctcccgcggaagaatatccttccacttattttcctctatcgacggccagtccgtactaaagtgtatccaaggcgagaacgcaaagacgcccgccaacggcaccgacagctccagcggcttgatttccgcgtgcgggtgggacaggtgcagcagcgtcgcagcggcaaggtttccgcccgctgagtccccgccgatgatcacgttggatggtgagcggcctgtctcgttgatgatgtagcgcagggcctcgacggcttgtcgcatctgggtcggatacgtcgactcaggggtgagcgagtaccgtgggaagaagacggctaggttgtcgcctgttttgtccaagtctttcagcatgtcgagccagaattcgaagtacgctgccatggcggggacggcgaaaccgccgcctgtttttagaagttagtattttggttgatatcatgcatttaagttatgattagactttttcctctgtggatgctaatttctccgagtgttacacggtggggatcatagacgcaccgtggtagtatataatgacgttcttggcgtctttgtttccgatccagtggccctcggtgttgtgtgggagtacgacagtctcgggtttgagaccgtgctttttcataacgccttcgtaggccgctggagttgaggggctgaggtacctgtgcaataatacaatgtcaatgtcgtgtccattctgatgtttgctttcttgcaacttgcagaagaattggagagagagaataacatactgcatctgacgatctgacctccgagtaaggagtttgcgaaccacagcggacacaacatagtgatcgtaacgcctagggctggctttaccccggaaaacaccagcaatggcagcatataccaagctgccgcaaagggacaggtacatgaatgggatatctgctttttcccagaaaccgagctgcggcccagggccatcttcgttcgacgacatggtggtttgagtgattgaaagtcttccgctcagccatgggcttttgtatcctcaatgccctcagctgtggggcagcgggacctgagtccgttgggcgctgattggttctgcgctcatatgcacgagcgggacctcgggaactatcagttcgggtagatgcgaaaggctcggtagccctaacttcctttatctcccgggcagcttacaacatacatagtttcaacaaagattcatatgaactaggagccctaataaatactcaatgaagggtcctggtgatatgaaacaggtgttcttcctggttggataacttggattttgataattctcccggaactatatcaaaaaacggagcacgttgggcatgtgccgaagctactgtgagaatagagacttagtttggatgggaccgcttagagcagggaaaaaggaacgaatagagagagaaagatagttgtatgtgactctttttgtatatacatgtgtgcatcaggagaaaagagatcctagagggaagcaggtcctacccagcagccagctcatcactggctggtttggcttatctataagttttcaactagacacatagattgagctcataaacccaggctttgcttattaccatatagccctggaggaagtgggccacgtggcacagctgaaaatatgtactggaagtgtgaagcggtccacaactcagctcctcatccagcttaactccagcttaatcccgatcaccgctattcaccgcccgtctctttttacttcggaatatctatagtccgtgatcgtcaccaaccctttgattgctcttaccttaagccactggggaaattataaatacctggtcctccccccagattggttcccttttttcttccttcttcatcctagtgcaagggctttacacgtatcagtgaggagacatccgagatcgtgtttttgctggttgaaaactaccaccttgactgcttcaagtgagccttacggcttgcttgggaatttttgaaacatgcttacctcaactccttgactcttgagtcctcgagttgagttcctttgaatttgatgccatgatggatatttgacctcagtgtgcgatcaccagtatcacgtgctgccacatttagatctttgttttgtttgttcgtttgcttgctcgcttcctgtttgcattgtttactagtctactttcatagattgtttggtagatagctaaacgagaggtttagggtttgcaacgtttgcaaagtgtcagttgtatcaacaggctgcttcccactgcacttgcttcttccttcatccttcctgaattgattcccttctttcttgattgaatagacttggtacgtcaccgtctttgcttgcataggtagttgccataattaccagttgatttcacatgttccttccttccctatctatactctaccttccctccccatctgataatgctgaaccctcttgtacagaaaccataccacatgatggaacttgaaagcgatttcatttcaagccacctgccccattagctaggaaacctgtattctcgatcagccatttttgattcaaatgtgcacatagaagtaagtggatatcatgtttgcattgtttatcaaccccggacccaaaaacccgccaaggaacgggtcgggtctaacccgtctacccgcggatttaacccataatatatcctcacgtttgtaattgatgaatgtggcatgatagttatcatagttttcttaataacgatgtgaagagcactcggcctttcgagactaaatgcagtcttagcagtgacgttatgaagaggattctgccgattcacaccgactaagttgagtgaaccccacaaatacagtcgtctccactattccttctcctccttttccccttccccctgctatactctgtacttggttttgaattggatgactcttttcttgaaataactagctagtaacaccgaaggctcaaatatactataagccatactgataatgaaacaagtgagccactatggtgaggtttaacttttgaggcggctcaaaatcaaaagctttatagtcggggttgggtgttgtcgtcaccccttgaataaggccttgagcggaagaaactccaattacaatcttgaaatgaaaatcctctgtgctaatttacccgaccgggacagacactttgacctcttgttggcaaaagagtcctcttcagcgacctgcgatgacctttcattggatggaatcagcatgcaattcaaaactcgacttgaaaaaagggagataacaagcaaggcaaaccttccctgggaggacagaatgagcgaaaaggacggaataaggttggcggctaaagatggagacgttggagtgaagacgctctagaaatctcgcatgtgatgggcccatcacctctcacggatagcgggctagctctagctaaagccatctatagccagcgaggatctcattcgctaccggtagaacaaggggctgggcaactcgaaacatgtacaatcttgccgagtcagaaaaccgacccgcaaacggacagttcttgtgctagctgtaaacgagatctctttcccggtgtggttttagatggttgaaagcagcgtgtgatactctttgatgtcatattagctacgcagtgactcgggcagccgtgtatggtctgcgtcgggacaaagttccctaaagtatattccacgccgaggcacgccgacgataatggaccgggcaaaccccatggggtaaatgatctaccaagtgagcaatatacgagggaaaccccagataataaaacgcccataggtcatcgagtggggccacttgtcgtggctttctcaaacttgattacgattcctggggccccgcattcctgggctctgcattcctggggccccgcgattcgtgaacaaaggtgcctcatgctatagagaggcagtagacggctaaaggtagattaagcggggcgaacttaacccaatttagttgtataggccgtaatgctatagtgcgaatttcttctcttatggaagatatatagtctacagatgtccgactattcttgacatcttttcatcactacgacactccgtgtccttcgctacaatgatgattaccaatatttatgtgatcacagtcatcgctgtgatcggaggctcgctcttcggcttcgatctgtcttcgatgtctgccatgtgagagttatcttcggaggaaacaagcgctttctaatcaatgcagcctttctaccaagcaataccgatgctatttcaacgagggacctaatgggcctccattcaatgatgagtctcactgttccggcccaggttccaatctgcaaggtggaatcaccgcctccatgtccgggggttctttcatcggggccttgatctcgggcttcgtgactgatatcttcggccgaaagtcggcgattcaattgggagctatcgtatggttagtcatgtttcaatgcgctgagctgaaagtagctgacgtgatccacaactaggattatcggaagtaccctctgttgcgccgctcagaacatccctatgttaatcgtgggtcgattcgtcaacggtctgtgtgtcggaatatgctcagcccaagttcctgtgtatgttggagagctcgcgcctcctcatctcaggggcttggtaatgggtgctcagcaatgggcgatcacatggggtgttttgatcatgttctatatctcgtacggctcatctttcctcacaggccctttggctttccggctaccttggggtcttcaaatgatccccgcgattttcctcttcatagggttattgttcacccccgagtctccacgatggttggcaaagaaagatcgctgggaggaatgttgtcacattatctcttctatccatgccaacaacaacctcgacgagaactttatccagatggagatccaacagctcaaggatgcttgtgaattagagcgcgacaggaccgacaacagttacatcgatcttttccggccgcatatgctttggcgcacgcacattgtcgtctttgtccagatctggtgtcaactcactggaatcaacgccattctctactgtgagctccctcctgtccagtgtggtggaattaccactaacatctctagacattacatatattttcggaatgacaggcctcagtggcagctccaacttggtggcgtcatccatcagctccgtgatcaacgtgattatgacaatccccgcactcctcttcatggatcgtgtcgggcgtcgtccattactcatcggaggcagtatttctctcttcatctggtggaccctatgtgctggcctaatgggaggctacggtgtcgcagccccgccaggtggcttggacaatatccccgaagagagttggttgatcacaggagctcccgccaaggtcgtgattgcttgctcctatctcatcgtggcctctttcgcgccaacatggggccctattgagtgggtgtatccgtcggagctcttccccctccgtctacgaggcaaagccgctgccttgtccacagccagcaactgggcgttcaatttcgctctgagctatttcattccgcctgcttttgtcaacatcacttggaagacttatatcatttttgcagtcttcgccttcgctatgaccctgcacgtcttcttcgttttccctgagacatcggggaggacactggaggaagttgaagatgcgttcaagggggttaagctggcttggaatatgggtgcagagaaattcaaggatgaagagataacgcttgaatatgagccgaagcaagacgaaagtgaaaaggctgtgcacgttgaggatactataagatcgacgtgaatgtatatattgttgagacagatcacctgccatggtacctggtctgccaggtttctacccagctaactattcagtcagctagctgtttgtttgtacagaatcaatgctcctccttctccccttcttcccttctctttgccctcttttcttttggaagacaggatagcatcccttttcttgaagcaacctccacgcctagcgaattccgagaggtgagtaatatcaaccccttggttcctcaatttccatggattttgaacttctcgacaatcccgaaagtgttccatgaactcggcataggagtaaacgttgtcccgtagagcacaaacattagactgaaccagtgatgacctcagagccttttccaaagcaattcaacaaccactacagcagatcccattctgaatgctaccgctcttaatatcgagatagggtaaagaggtagtcaccatataacgtagcagcgccattcccttagactgtatcactcgcgtcacctcgtcatcttcacatatgcatgaccttctaaaaattctgtcgacacaatctgagttctccttctccgcaaaatttcacccattgaatatactcccgataatggcttcacggtaggcactgagctcatgtggacgcgcttgctcacagcagaatatgaatagtaggatatggtgctccatttccagtcacatgtcctcctttgcgattgttcttttcctgtctctgttgctcttctatatataattcttcgcatactatttctggcacatcccttatgcccgtctaacaccccacctttttcgacgtgggtaacgagccgcttcagatgataagtcttcagttggtaatgtttttttttccctattggatccacctaatagtatgggcctaatgggccagtcgaggatgcacattgcattagattgtagacgctgcgccagataggtctttctctagaagcatcctacttagtatgaatctgagtggctctcttatcgagcattctcttcgtgatagaggcttttcctcttttctcccctttccgactagcggctagttagaggagagtgacggtcgtctacgtaattgagaacagacctgactatatccgaagctgcctctcgatggcggtctaaataatatcggtatcattaaatcgtttagtcaaattgcggtaggttcggtcgtttactgaaacgacaatcgcagtattattagctcttacctgacaatgatgggcaatttttcgtcgaagaagaactttctctaatttcttctctaaaaatagctgataaaaagcactaggggccaaaataagatcttcttctgtgtcctttgaatcacgccggtgagtaagtagttgggtgggtgaccaccagcgaatcctaactgttgtatgtttttcgttttttttttcgttttttttttcatctagtagacattctctctcatcgattgtaaagtgtagaatgatggaacgggctattatcattacgcagtctcccattttgtaccttcagcaatttgggagacttctttgcacttccttcccttcttggttctatagtacaacatgtggtatggcaactcccacctgtaattcttcaacagatttcgatatgtagagtgggtctgatgtacatttactacgtgactataagaagcgaagaagtgatgatcaatggaagatatgaatgatacccgatgccgatctaactactgccatgaagctccctctagttatagaaacgtacggcaaagatgtgctcaggttctcaaggaaactaaaaaagtataatattcgcagattccaccttgttcattgaagcaacgcagttccaggtacttagttctgactcaaaatcagaagagtcccctcccccaacattcccctctacgatgggatgagaaggacctcctcagccccgtagtagccctatccctaccagggtacattccagagccagcaggtgtctctggcggatcacagagaatttggcattctctcacatccggtggtaaaagaaatccacctttaagacgaaatcctgtaacttccgtgtttgacggaccgcgatgatcttcgttgaggacagctgaggagcataatggcgtctcaaagttctggaaacagactgcaagacatgtcttatctgaaagcaaaccgaggcataaggttgtaccggagaggccttgtagcgagtcttgatcatactgtgtcctccataggatagagacactttgggatagcagttctttatcccaaagatactgcgagccctcgacaatagcttgttgagcacgtgttgatactctcgtgcctatcctgcggatttggttcccggttgaaacattgaaactcgtcacaaagacgggattgccatctgacacatcctgatatgaaccccaaccggatacctgtggtgtgtggtcaggtgttaccattcgcggaagccctcggtcgttggtgatcaatgatagatcgtgggtaaagcctattgggaatcgaagaggcctgcgactggcttggtcgtacgtgaatgagattgtaccgacctatcgctcgaaggtacatactgcattagtaacttagaccgtaaatgagaggaggcaatattctctcaacacacatacctcttgcgattctccgacaaggagaacggttttccctataagggaattacctgctgtttggtgccgagccgtcccgacagctggcacaaatgagttccttctgatagggagatatcgagccattttcttcttgatcttctgataccaatcattcatacgaagcagaggcgttggaagcatcgttcggagagtgacgaatgcgtgcgtgggtaccgtaatcgcctcttccccgctagggaaacgaagcttcagacctaacgcggcgtatccatcgacagagttgggcctggtggtaattgccgcaccgcggggaatcacgttcagagtcggttcatcctgcaggatatcgtactgtaggcgtaagcaaccaaaactgtctgcaaatccatcgtggagccaggaatattcgatgtctgagcggttcttgaagagaatcacaatgaacccacttatgaacaccctgacgccgagcgcacacggaaacatctcccgtaacaggtttagatcatttggagaaaggaattttcgggggttgaggataacactgagagggtcattctggagtttgggccatatgacagttgtccgctctatgtatcccgatggttgaacatgaatttccaagccccctgcgtgagtacctgtggtttttttgggagcagaatgtggcgctatggcccacatccacttattatcccactcaagtaccatccagacaggttggaggcagcttagagaagggtggtaggttcgaattaactgccgattcgcatcggtcacgttcggttcaagaagggcacgcgcggctgcggctttctcatcgccccactcagatgagtttgtttctaagagtgaattagcatatcatatactaggctgtattgtcgaagacgcaaatgcttacttggtatctcaatcatgtgccgaaattgttcgattgaatccggcaaaagatcttcatgatgatcaatgcactcggctggtatggcggggtacggaaaaatggaggattctttggcagataaacgttgttttttatagacaggtgagctatgctcttgaagatgaggctgtcttaatccgggcatggtgatggtgatggtggatggtgactgagtataaatcgtgtgtgtcgaagctaattggcttgccgagtgtggatggacaaggatgcaggtcccactgacaattaccactacacctaattgggatgggccaatcagcgtctacttagttatgtcatcttattggtttctaatccctgtccgcttgtttcaccgccttctctaatctcaactggcagatagactggtatcatcgtggaagaagttgtgaccggccgccagatgatatgttttggtggaaagccccgccttggccgaagactcgctgagcgtaaagatggctgcgcgcaatcattgaccgagcacgatcgcagcctggccaacctcactgggatccattgcctaaagcaaaagtgtgaaggggtgcaagacccataacaaaatatatgtaagatttgaagagaagggaccacagctttggtctttatgccgcctgtgtttgaatcgtattggaaagtgacttgacataagtattgcacgccgcctcaaccccctacattatatgatattctgccaaccggccacatttttatgagtctgacattaattagacttaggcttcaaagactagaaatgcggtcattggctccctggagcttatattcactcatttagctgcaaaggcacatcatagccaataaaacgtgattcagcatctttatccaggccataacaatcagctagtacttgtagctgctcttctgagagtatgccatcgaggacagagcctatagataattttagtcgtgaagaaatgggtataaacatcaagttcttaccagtattgatttcgcgtctttctctccaagccctaatccgctctttcaatagagcaattgagtgtccttgagtattagaaacagcctggctaatcggaatgtggagtgaatcaaggttctctaatatctctgaggcgcgactgtattgtccaacccaagcttttcgaataattgtatcgatttccttgatgattggtctgtatcttaggcaattctaattccccatctctattcgtagaaaactcgggtttgaagccatgctccagttgaaatagtagagagcctattgcaaatagatcagttacctcagatagatttggtgaagggccgttgaccggaagcggtagatctgagataacgagatttggttgactaaacggactagcagtactgaaaccacaaaggatagcagagccccgattattaaacaggatattgtcaattcgtatatcagcatgaacaattccaagcttatgaatatggcaaagaccagcggtgatctcacgataccaccgaattctggtaggctgtgtaggtatctcactcgccggtaacggagaatatctgtgaagaaatatcccctccgcttgatcagtgtcgatagcttcgatgatattaggatgtggccactgctgaaatagtcgtagaacagctcgttcatcctgtaacaagctagagtggaagatggtatctgaggcgtagtggtatcagtcgctgtcagaggcgtcgctcccgggttgttcaaaaatgcgacagcttttgaggacaatgtcctcgtcaacctcgtagacttggccggaagctcctatgcccagtattttcagatcagactgaaatagcggccgtatggtataggtgtagttcgatgttccgccgactgtatcattggactgatgaaagctgggtggataggatctgataaagagcggaaatataccagacaagataccaagtgcgccttcaaaaaagagcttccaggccgcacatacagtcgagtaatagttccagaagtagattggcattttgccggtaccgggaaattaggagacgtacaacttgtagaagtggcaatcaaaatcagcggcgtgcagacaccagggggctgaatgtagttgataggaagctaagggggtcagtggggtggtcgcccaactcgggtgattctcaccgtcacgcaaccgtaaaacggcactcatacacaagtgccaatgatgagaaactaaacaatatgttcaaatttacggatgacagatcgtgcgcctggtctaccggatgtatttctggcgcctgtcggcatattattagattggcttaggcgtagtaaatctaaagctcagttgcatcacccatgtggtcaattcgagatttagcagcatggcttataataatattgtggttttgttatttcataccacaaagtcatccctatctctcatgccacttcacaggtttgcgccgatcccagaacggggtgttccatcttgacacaacagattagaatataacaatttagttaccgctgacctagttttcctcaccggtcggggtcaattcacagaatgctttgtaggtcgtaaagacatcatcatcgccctcaccgctgccagtgttctcaatcacacactcagcggtagcgccgacgaagaaaacatagccctccttgacctcctcggtcttgttgctaacagtaatcttgcccttgccacgtgtacatatgaagatactggggccgtcgatcgggtcaaaagtggccttggcgccagttcggttcaagtcggccttgataacactgaactcgtcgataggagggtcgtagagcatcacggacgaggcgctagagtaagcagtggcgttcaaaatggcatacgggtagtctgtggcctggatcttctgctcctcgattggtgcgtaggagtaggtcagcatctgggtgagggtgtcaacgtccttgaacttcggggtgaagcccgctcgcaccacgttgtcagaggaggccatgcactcgatgacatcaccggaaatatacgcgtggatatcatctgccttcaggaacataccctcgccaggctgcagcttgacaaagttgaggaagaagaatacgaacaggccgatgtcgttcgggaactgtccgttcaggcgcttggcaagcgcagccagctcagcggggttggtagggttcgtctccacatcacctgccagggttgcaaaactgtcggggctattgtccgcagccgagataaggttcttgcaggctgtctctatcttttcggatgaagactccatcagcgtggtgaagagggagcgtagcgcttctttgttctttcggatgacagcaggttcctctgagttttcgttgcccttgacaatttgctcgaactcactcgccgcctgattgccaacaagggtgcgcagaggctctacagcttggaggaaatgtgtgatctcggcgagcgggcggaagccacacataccctcgaacggagtgatggcaatggtcatctcgggcttgtgattgtcatcttgcaagcggttagccatgtttccgggtgctcgtgtatcgagtgtgatccgaagtaccactcaccgggatagttctttgggtcccgggcatggagctgctccgcgagcttcttgtttggatgggcttggatgctgagcgctttacggatagaaagcaccttgaacaggaacgggagtttgcctccaaatcgttcactcacatcggtcgacagcaaggcctggttatcctgaaccatgtcgaggagggtacgctgtgtctccacatctttcgatggaagagaggggtgtgtgcccatccagagctataaattgtgagcccatcaagtcgaatattactattgatctctcacttacttctgcatagggcttgtcagactcaattgtaaagtccggggcggctgttgtggcggcatacttggccgctgctgactcttggccaaccttgcctatgacgggatgttagtgcggggaacacaatcgcaagcgggactagcttaccccagtcgtagctattgacgcctaaaggaaagtatgtcagctatgtctctcttattgagcatccccaaacttaccgcattgcagccgaagtagtggtatctgcatattgaaatggatgtttggagggaaaggcgggggtcaaccagcgatcttgtattagaaattccacgccaagccttcggtgagagttgtcagagagggtcccggatgatatctatagcacacgtccagagcttgaaaaggagaattggtctggtttcactcagaggcattcccggctttttgtttatgggatttacggagtggtatcctaatctgtcatagattcctaatgaggtagtacttccgcaagcatcctgccaattagagccaaaatgtacagccgcatcgagacagtatagtttgaataggttcaaggtcaaagtatcccagaattaatcatatataccctaaagaagacaagaaatacactatacaactgtcgacgtcgacacatacaatgccatgtcccaaagtagttagcgtgtcaaccccgaccgcccgggggaacggggcccttatcaccgcatctccaaccttcaagtaaacaacttgttgcttcaaggagatatcaataccacagtggttctggtcggcagtaagctgcttatactctttgcacattctttacactaccccattgataaacggtccgaggatgtctcgcaaccgcccccgacccagagacaacggatttggcaataatgaggaactggagctctggaccaagatctgccaggatattcgaaaatctaaagagaagttcgatcaacaaaactcattatcccagcagattcgagctttggtagacaagatcgcccataatggcaaccgtgagtaccccccgcactagagccctcggctctataccgcaaagctccaatatgcgcttcgcttacaattaatccgaacaaccccaagttcattattaatcgtatatactaatatgcgcttccaagcagaaccaactatggccgaacacgaccaactcgacagctggctccgcctaagccagaaactcagcgaagacgagcgcgcgatcatgcaagacgagccatgcgatgtaatcaaaaacctagaactgctcactgccctgcgcaaagcatctgaagccgaagcgcctccacatcggtccacatcattcaacaagtcacgcaagaaaagaaatgaactcgaaggttcggtaaccgactcccccagtgcctcgggggctgacaagaccgcacgctcaaaggggatcgtcccacgcagcgcaagcgtctcgtcaagcacacaagcccgcgaaggggggcgccaggataatatcatggtcaagatcgaagaagggccgtcagaagggacgaagggcactgtcgcggaacggagtggcttgctggtggttggggctcaggttgtcttcaaacacaacaagaataaacaaggggtcgagggtgaggggatccaatgcataatcaaggctgttaatggcgacggcccaaagaaacggtaagtgatgttaggtcgtttacatctcgtctcgatttacgttgactgacgcgtcatgtctgattcagatatgatgtgcaggatcccgagccgaatgagaatggtgagcagggagcggtttacaagactaccgctgcctctcttattcccattccccagctcagcgcccacttgtctacatatccggctggcaagcaggtcctcgcgcgatatccggacaccaccactttttatcgcgcggaagtgatgggtgccaggaaggacgtctatcgcctcaaatttgagggcgaagaggacgacaaagagatggaggttgaccggcgatttgtgctggatattctgggcaagtaaacccagactgtttctacgatctgatgtgatgatgataccatttaagcgcggcgctatctggagttcgaatgcctaccatggatatggagctttcatcttgactagatactttagctagagaacaaatcttttttgaactatgataattctgtttttagagattctacgcacagaggctgaggctgaggctgagcagagcagtgccagatgtctacaataaaaaagggttggcataacaacaatgattcaagccatgtcattcccatcatgttgcagaaacaccaatctgacgctattacccccaacggcgatgcaatccagcttcttctcggtcgggataatgccgattgccccctcatcgagcggatattgatggcacatactacatttcagtctcaacgaacattcacgacactgacacgcatgatatgaaatatagccatgtctttgaaaatggccagggcattgatgatggatgtacctatgtcgttgatatatatactggtggcgtgattaattgccgttattgtttatcctttccttccccgatgtcggcttcgagtcgggaggacaatattcaatgcttgactcttggccactaaaaagccatgcatttcataggatagtgtaactccaggtcaaacaagtctgagatatgtcataagctcttggcgaacacaattctcctatcctgggtggaccaaggcccgagagaatgtgctagagtaagcggtatcaaagcgatgactcagcctgcttctcctcatgccgagggagcatagccggagcattgtctacttcgccattaaaactttccatttaacagaatttgccctatatttccgtcagatcgatgcttccgcactattcaattcctacccctgcatactagagcacctgcagcgagcttcacacgtcacaccttccgactaccccgcctccgccgtcgcaatgaccgacctaccggcacacgcctcaccaaaattcgatgcgcgttcgcccccaagcagattagatggacactcggatgatctgagtcaggagagcattgcgtcaggtgaaaacaccccgactctaccggactcattgctctcgcccgcattcaccccacctgcaacccccgggggtacattgaacttggatttaaatcccaccaaaatccttcaccaaaaccaagcagcagatatccaccataatagccaggatgccaaaggcctcaaattactcccgcagcttccagcagtggaatgtattgtgcgggcgcgaattccaacaaccaacggagcggaaatgttcctacacctctaccacaatgacttggatggaaaggagcatttggccattgtatttggaaacaatattcgtagccggagcttggacagcgtgcggccaggggagaccgagatggaccgaatgatccgcggcgcgtacattgggaaattgcgcccgggtcgagtgagcagccggtatgatgagcatctggccgggtcatcaacgccaaagcaggtcgagccaccgctggtgcgaatccactcggaatgttatacgggagaaacggcgtggtcggcgcgctgcgattgcggcgagcagttggatgaggccgcgcgtttaatgtctttccccgtcgaagatcttgcctctgatgcgccgccagaagtccagtccctttcgtcacattcgacaggtggtgtgattgtttacctccgtcaagagggtcgcggaatcggtcttggcgagaagttaaaggcatacaatctccaggatctcgggtcggataccgttgaggcaaaccttttgctccgccatccggctgacgcccgaagctatggactagctacggccatattggaagatcttggttgtggcgcggatgccatccctgagggaatccgtctacttaccaataaccctgataaagtccgcgccattgagggccctaaccatgaggttcttgtaaaagagcgggtgccgatgatcccattggcatggcgaactggcggtcagaaaggaattaagagctctgaaattgaaggctatcttaaaactaaggtatgtttgcaaactattggtcagttaaggattgatactaatatgccgacttttgatagatctcgaaaatgggccatatgatccaataatccatcagcttgtcgttttgaacttttgcctccatcattccccttttcatctggcttatgctttctttcttgcattggaacttacaaaaagcctttgtatatgatcgacacgaccgaacttctttgtgcataatcttgattctttgggcttgttccaaggttgtatatggcgttgatactctgtatattctttttttgtgtggcttggttactcaatgcttccatgttcgccagcttctcctaaaaattggaggttttgtctctagatatatagcacttggaacaaataaagtcagtttcacggtcattcccaagaaggaattcgataatacgcatgcccgcatgaaagtttaaatgactatctcaaacattgacccacatagcagtcacacgtcttactccagagctcctgattttctattctacatttccccggcctgtatgggataagcttaattagcgcgtgtgcaaggccatggccacccgcactacagacgccaatgggcatgtggccccttcgcccgacctgtccgacttgcctgaacgtgcgcaatctactccccacggacccgaagactcgcgaatccctgaacgtgcgacctcgatagatagagcaggactcttggataatggcgcgacgccaggacgcaagcgcaaactgaatagcatgtcgtcaagaggtgttgccaacctcactcctgatcagttggcgaaaaagcgggccaatgaccgccaagcgcagcgcgcaattcgagaaaggaccaagggccacatagaaggtctggagcaacaggtccgggacctgtcatcacaaaagccctaccttgatcttcaagcagctctgcgtgagaatgagttgattcggtcggagaacgcggagctccgccaagggctgaaagcggcaatggacattctccaaccattgatggctaagccagaactgcgaggtgagttcagcattccaataaaattcaagtttggggctgatatagatagatgcgtctcattctctagctatacccaagtccgccccgcccgcttcgcatacatccccattgtcctacaccgaccacctcacccccttttcaggcgagaaatcctaccccgagtctcttgccagccttgatacgccttctccgactcattctgcgcctaatttcgggagtcgccgcaacagtacaaatggaagccctccgtcggcatctctccgtgtcgcatgggactcgcaacgccataatatcactcacggcctagacctcggctgcgaggagcgtctagggtttaatttccttcttagtgatatgcatagtgttcccaaagtcgacgttgttcaccgcagcaccccagataacctccgctatccgcagctgaacccttcgtcttcaatatacccacatccctcgactactccctctaaaccagggccacctgcattcgccgctccggtacaaaacttaacagcgacatgtccgttggataccatccttttggaatttctccatagccgacaacgcgaggcggctcaaggcatccctagacaaaaattagccgggccaccgtacccgagtgtctcttcgctgctgaatccggagaggagcgtctactctcatccagtctcaaaagtcttcacagatatcctgcgcgcctttccagacgtcgattctctgccggagcaggttgctgtcctctactccatgtttctcatcatgcgctggcaaatttaccctacgcaagagaattatgagcgactcccagattggttaaccccgcgcccgacacaacttctccatccacaccctgcttggatggattacgttccctggccgcgaatgcgtgacaggatcgttaccaattaccagaactatccgtttgagaattggttcatcccatatacgcgtgagatgagcctcaattggccttacgaggatacggactgtttgctgtcaaccggagactcggacgagctggttatcaacccggtcttcgaacggcatatgagaaatttatccaattggtctttggggcccggatttgcaaaatgttttcccgctttggcagacgctacacgaatcatgccgaagccaaagctcaacccatcaagcggaacagactcacatagtggctacacgaccacttaagcggcattccaactggtccacctctatcaagttgatcttggttagaatttttaaattccatgcctcttttcggcgaaaaggaaatcctagcttttagctagtcaaattgtttattttttttggtgcttagttttcttcggcggagtcttaatacacaagggaagaagcatgctgtgagaagggccacggtcacctcattcgcgttgtcaatagatgaatcttgaagagatcatttctgtctggacattcaaacaaatacaaatcttcttagtaatagttactctgttgtatatcttatgggagcatggttttgactttactctttcctgctcttctcattccaaaacgccagaccagccttctggcgtagaattccgtacatcgaactgctatccaggcactctccgccatattctctcgcagcctccatgttagtcttggcaatctcaaggccaggaagctcaacaccctgatcctgggccattgacatagcatgtctagcatccttgatagcaagagaaacaccaaatccaggatgagagtccaggggcggcgcataagcaccggtagtcaatctggaaacaaagataagtatgaaacgccatgccagcaccgaaaaaatactgtaacacacctcttagaataccctccggcaacagcaccaaaagcctcgccaatgagttcttccataggaccagttccaagtccggtcttctcggcaaagacctgagcctcaccaacagcctccatcatgttaacagtaacaatgttacccgcgattttcagaagggaagcctttgtcgcatcctcaccgcaatcaatcacgcgccgacccataacatcctggatcagaggtttgacggcatcagtcgcactcttcgggccaccaatggcaaaaacaagtttgccatccacggcaattgggttcccgccgaagaccggcgctgctacgtacgatgcacccttgcttttcagctccgatacagccgattttacagtatcgggatgcactgttgagcagtcgacgaagatcttgtctttcaaggactggcttgaacccatggcggtggatagcaggctttggaggactgcgtcattcgagatctggaagaggctttagacattgctatgtatttctcggtggaatctgcttaccatggtgaaaataattccacattgagacaccaacttctcgaaattggctactgggattgcacccagtgcttgcaggggtgctccgcgcgacatcgtgcggttcgagtagatcaggctcaaggccttcttcgtggctaggtggcgctgcagattggaggccattgctaggcccatggacccgagtccatactgtgttttgttagttctttgttcataattgtaggtgctctagaggctgattacccagccgatttgtggcatcgttgctcgctctttttcctctggatggattcaaagggcgacaatgggctctttagacaacgagtcaagatcgattcgagggattcaagcgaaatttggcaatccagagtttacctgtgcagggcaatgcgatccttgtatgagtctactttgtagggacgataggaatggtggagcgtgtttcccgaggatatcggtgtcggccgacaggatacgcttcaacgttatcaacggtactgcatatctgcaggttaaaccgggcttggacattgttcaatgaatagtcatatgattcgtctctttgccatattcttgcttggtgtgtcgctgtagtcaagtccacgtgtataccccttaatgtgagacgttccacatatactataacctgcgcatctattgatttcagcattatcccatgctccttaagacctcaaaatcttcttttaggccctaatttatcatctctgagttcgtctggtctaagaatgcgttgacgtggtcacgtaccgtcatggctgcggctcgccgcccaactgtggggtgaatatcaggtacggtacggtcacgtaagttatgatgctccgtctgtcgtggacttgacttcaaatatccccaacacctccgctctcccctgaaccctcctatttccactcatcttgggagtttccgaatataatctcagtcttggacggtacccctactcccaaccgtcgaatccctaattcctccaacatggcggaaatgcccattggtacacaccgattcccccaggctaccgtgtcccagctccaagctaacaagctactccgcagtcctcgatggaggaaccggcttccttaaggtcggctacgccgcccaggtatgtcgcatgacccctacagtccatgtttgctcttctctaatttatatttcctcgtcagaacttcccagagttccagtttccctcgatagtggggcggcccatcttgcgaacggaggagcagggcggcgacatcgtggtcaaggatatcatgtgtggtgatgaagccgccgctgcacgatcaatgctccagatcagctatcctgtatgtttatatcggggttcttgtcctcgcctgacctttctaccccgcctccgcaaaccagtcgtgttgtcaatgcctaacccgcgctgctttagatggagaatggaattgtcaagaaatgggatgacatgcaacatctatggaactacaccttctacgagaagatgaagatcgaccccacggaccgcaagattctcctcacggagccacccatgaacccgctcaagaaccgtgagaaaatggccgaggtgatgttagaaggatacgggtttggtggtgtatatgtggcgatccaggcggtgctggcactgtatgcccagggtatgtgatacaagaccacagtgtcagttgaagaccaatactgatgtcatgtttcaggtctgagcagcggcgtggttgtggattccggtgacggtgtgacacacattatccccgtgtacgagtcgaccgtactcaaccaccacattcgccgccttgatgtcgccggccgcgatgtcactcgcaacctgattgccctccttctgcgccgcggctatgcgctgaaccgaaccgctgacttcgagaccgtccgccagatcaaggagaagctcgcttatgtctcctacgacctcgagttggacaaaaagctttccgaagacaccaccgttctcgtcgaatcgtacaccctgcccgacggccgtgtcattcgcgtcggcagcgagcgcttcgaggcccccgagtgcctgttccagccacacttggtcgatgttgaccaacctggtatggctgaaatgctcttcaactgtatccagggtgccgatgtcgatgttcgctcgagtctatacaaggccatcgtgctcagcggtggtagcagcatgtaccctggtctgccctctcgtttggagaaggagttgaagcagctctggctcacccgggtactgggcggcgacccagagcgtctgaacgtacgtcgaagagaacccgacaattaccaatataacatggctaatgattttccagaaattcaaggtccgcatcgaagatcccccgcgtcggagacacatggtgttcctgggtggtgccgtgctcgccaacttggttagtctcgtttcttttcctttgaccccggccctgctaacactattttcctcagattgccgacaaggacgacatgtgggtgagcaagcaggagtgggcggaacagggtgcacgcgccctggacaagctcggcccgcgatgaatggattttatttaggcggttcctggtctgctccttttttctctgatttcctgcttcgcattgtttgcaagccatattgcctgggtcttttttccctattctcgtttccttctttgcctccaccttccccccatcattgtcgatacactcccgtccatcttgtagtttcccctgtctcttcgcctgcttcctacattgtgcctagactggtctggcgcgggtggattcagggcgttcatggtagaaaagaacgaaatatttctatcggcttttctttgtataccagctttgtaggttatctacgtataactatggtgggacttatgatcatggttgcatacagtctatcgtcaacatcagtataaccaagacaaagtcatacccatatgtacctgcttctttcctccgctagaaaatggctaccctattcctgggtagaacgaaacgtgtatataaactcaagaaattcgaaaatgcaaaatgctgcacgcaaaatgctgcacgcaaaacgcaacaaaccaaatgaggactatcacaacagaaggagtaacacaaagagagaaacgaagaccagtcggcaaccaaccccaaactaattctcaatggctcccggcgagaccgccaagataaccgcaagagtagcaataatcagcgaagcagccacaaacgccgtaagtgccacactaccccgactagccgggaacttcccccgaataatccaatactgactctggaagtagcggtggaagccaatcataaggataaggatcgagacgccgatgaaagtggagccgaggggtttacccacgctacgaagacgggcggttgcagaggaggtgtggaggtcggctgaatcgtagcctgacgagtcgaggtacggtggaaggatgcctgcgtgtaagccggatgctgggtcgaagaagttggtttttgtctttgtggaggcgctgttcaggcggaagagttgcgttactgcgatgccgattgaggcgaaggctagggaggtgcgcatccaggctaggaaggttcgttctgttggaaagggggtgggtgtcaggggtgtctatgcatgttttaaatataggctgcgtgtgcatattgtacctaatgcgaggtggtcgcgggccacactgcctttgttctctagctcgagactgccgtatcgatctgcgaatcgactataccaggactgatggggctcgggggccgagtcttgggtggttgattggctggcattgccagggttcgcgttgtttaattggtctttgagctgggaggcgtctgcttgctctgtagactgataattgcgccccgcgggaccggctgtgttgattggggtagattcggtggattggtatgatgtctgaggttggttctggttacgctcgtggtttcgggtcgaggagcttgagtgggaccgggtgctgctggaggaggatgacagagctgaatctgtgggcgagcgtgacgatgagtggctgtttttggctcccccagaggtgctggagcctctcagaggcggcgccaatgagtcggatgtattcattatgcctgtccgcgtgtttttgtgtcactgaagagagtattgtgcaatccacgatcgccagggaccgagtttatgcaggtctgaagcgccggttcgtctatgtcaatagaggatgaaaagttgctgtttgagacaagatggtcacggtgatggagagcaatagttgtgtctgttatgctggactcttactatctgcatttcctttttctgctctcttctccaattgcatcaagtataatgtcacttcgagcaaaagcacgcaaggtgatgatctcccatccacgtgaccaatccggggaagcgatcacatgctccactctaacccacctgggtgaacccttagtccgaagtgtcgatgcaacttgtcaagcttgacatgctgatatggacatccaatgtagatatttacttctagtcaaccatttactctgatcttcatatcttattttacaagctaacacctcattatcttacccgtctggtaaagtgcgtcatcctctgtttaaggcaggcggtcagtcctgcttcatccctttatcaacttatcgacttatcgatttccgctcccctcactcaaccaacacaatggcgtcacaggcacctttaccatctcctacggggaaggtcgatctctcgaaaaagctctctgagttacggtcaaatagccgaaggggaaaccccagttcccgagatctgactccagcaacccctcctctcccttcgccgcccgacctctccggccaccagtaccagcaaccaatccgccgcatcctatcttctaaagaccatgagctcttcctcgcatcgccgacctataaacttgtcctcgcctttatattcgggctaactgattctgtgcgggggcattctatcccggacctccagaaaaagcctcaatccgaatccatctccaaggtcctctcagtcatcactcaaatacgcgccctcctagccaaaaacccgccaattgaccagggtggatcccgattcggcaaccccgccttccgagcattgtgcgacgatgtaagcgcccagagcgcatcatggcacaccaacattctggggttgaaagactctggcgcaatcgaagaagcgtcgacatatttaatccactgcctgggctcacgggagcggattgactacggctccggccatgaactcaacttcatgatgtggctgctatgcctgtaccagctaggtcttctccccgccagcgacttccccgctgtcgtgatcaaggtctatgtcgagtacatgcatctcatgcgcgagatccagtcagcttactacctcgagcctgctggatcgcacggtgtctggggtctggatgactaccatttcctgccgttcttgttcggagctagccagcttgtcgggcacccgtatattactccgctgggtattcataacacagctactttagatgaagagggtgataactatctctatctggatcaggtccgatgggttgagagtgtcaaattggtgaagggactgcgttggcatagcccaatgctggacgatatctctggttctaagaattgggccaaggttgagagcggcatgaagaagatgttcgttaaggaagtgctgggaaaacttcctattatgcaacatttcttgttcggaagtcttatacctgctgccgaaggcatgaccgattcttctgagagagatgctgagcatgagcatgcccatggccacgaccatcctcacgagagttcagactggttcggtgactgctgcggcatcaaggtacccagtaccgtggctgcgggcgctgagatgcgtaagcgtatgggcggcggatcggacctgcgcccaattcctttcgattaaggtcgccgatgggaagttggaagttggcatgccaacaaaataatgaatcaagatgactagcatattagaaaatgcaaaatgattatctccatgtgcttcagtcaatcgagtaatttgcttctactcctacctactgccgtatgtacctctgtatactccgctccgtatacaagagctcttttccggttagaatcaacgacaaagtacattactcccagtatggaacatatggtgagacttttgcctgatttaccatcataccatcactcttagttattagtgttattagtctaccttgggaagtttagcaaaaccctagactcggcaatgcagaagcttccccgcacggagatctatagaccacgaactactcatctcggcgattttgcggacttgatcaacagaaatagtcgacatccatcaacttcgcttctcggtgatttcacgggctacaagaactataatcggaaacaagcactcggttattcaatagaccgcggttgagacaaaccatgatataaccccatttctgtctaatgtaccaacaatcctcgaacagctctcacatttatctacatcaaaaacatgtcaacccagtctcgagctcctgcatccgctgagtctggaacatttactcagcttgggacattgccgaatacatacacttccgacatcagcctgcagcgaatgctaggatgtaagtccagcgtggggaccacctttgttcaatctaacctgaagacaataaatagggtatcttcctgcagagactctcaagttagttgaaccccatctcgcacaatttggcgaggaggctgtttcgccccaaatctttgcatggaacgccgacgcagagaccaacctgccatatgtcaagaagtacaatgtctggggccagcggtatgggtatgacaaactgattacgactgatgggtggaagcagttaggaaaatggggggcgaaacatgggttagtcgttctcttttttgatatacatttgacgctaatacgaaatgtttagggttgtttcgctgggctatgaccacacatacggtgttcatagacgcactgttcaatatgctgcgtatgttataattccttgttctttcccgaactgctactaactaccggacctaaagagtgtatatatacgtcccgtcgtcgtccatgtacagatgtccgatgagcatgtccgacggagcggcatttatattatcacagcgtctcaaggatctgccaaatgatcatattctgcacactgtatttcggaaactgacctccagaggagacgactactggacatccggccaatggatgacagaacgagcaggcgggagcgacgttcaaaacacagagacatgggcgacctacgcaccattaccacaagcatcgaaaacatccgacgtcctcgccgagggcgactatttgatcagcggattcaaattcttttcttccgcgacagacgccaatgtcgcttttctcttagccaagacagattccggcaaactgagcacatttatcgcgccattacggaagacatctatcggagcagatggaaagccagaagaagtatctaatggcgtgcgcatccaccgcctgaagaacaagcttggtaccaaggaactacccacggctgaactggaactaaagggcatgcgcgctcacctagtcggcgaaatcgatcagggcattgtgactattgcgccactattgaataccacccgtatccagacgcttcttggaacattatcaacctggcgtcgtgcgattagcattacaaagaatttcgccaagtcacggactaccgtcggcgagccattgtggttgattccgatgcatctgcgcctccttgcggacgtggaggtaaagcatcgcggcgctataaatctcaccttcttcacaattgccgtgatgggtctgattgagaatccatccagctctgcgagacatgcacatatgcctcaggatctaagcgaagcaaaggtcatcttccgcgtcctcaccgccacatgcaaaggcgttgtcagcaagatgtcgatggtaggcgttcaagagtgccaggaagcgatgggtggagtcggatacattgacgaaccagacgagcctgagttcaatatctcgcgcctcctccgtagtgcagccgtgtatccgatctgggagggtacgacgaatgtcctggctagcgagctcgttcgctttttgatgaaaaatgataacctgtctgttttgtcggggtggctcagtcgcgtgttgtctttgatccgcacgtcgtctctcgcgggtgcattgaagcaggctctggcttccttcctttctcgcgtgacatctattcgtccgctggctgcgttgctggctgatgctcgcagggttatgtttacctttggctggattcttgccggggcttttctggctttggatgcggaacgggatggggatgaggccgcgatggaaattgctcgcagatggattctgttgggtgagggtggtgtgggtgagtttgtctaccgggatattgtcaagccgtatcaggcctttgattcggcttccgggagtgatgagcatacgcggttggattgtaagattgcttggggtgttgaattgccgtccagggtggtatttgggcatcgatctttgagcgattcgaaactctagatgtaatcaattggatgaagtgcttggattcaacatattcaacattgaagcagataagtcaggttgtttagcatggtaaagacgctttgagattgcttgatcttatcaacatcccatccaggggtttctaagaaatacaagtgatctcgtcggcctacggccgtcgagatagtcgttgcagagcaaagcgactgattctaacttctaatgctgcgcaaagcccccctcttacttgttacgatccaacgttgccttgctttgcttgtttgcttgtttgcttgtttgcattagctagattgtttgctagatagtttcgcgagatgattcgaagtttacattgtttacaaagcggtcaggacacagctataagaactagctgtccgatagcgatccatatggatcgtgacaagaagtttgatagctctaggaaaacttaggaaaggtatggacattatatagatagatggtaaaccaatacgtttggttgccttctgtgctgctttcattggagatatgccccagcaacaagataatgctgggtttcggaggcagacagcgacgcgtggatgtcgaaaatatctggtcactgagccatctactgccctcagaggcaagctcctatggttcccttatctatttccatcggaaaatatggctgatgttttccttttcttcctgtcatttacgaacgagaagtctgtccccgattatttcgtgtacgaatatgatccacttttgttattctacgtctaactgatcgaatgattgccggcatatggtgacattgtcggagattcgttcaggccggacctcgccctcgttataccctcatcattccttatcacaccctcgtcgtaccctgatacgattcctcgccctaccggctgggctcacctcacagcccaaggaatatccaggtcgaggaagaggtgtcctagtgccagcaccacgtttgtttggagataaaaactaaggcacatcaatggaggagtgtatatgggcgcttcggattcgggaaatgatccgaatctgaatatatgcgtctacaagggtggaagcatggatcaacgcatgtatatacctcgggaaacagaatacttttaagcataataataccttcctaatactcgcataatactaggcaatgtagcgaatacgggaccaatcctgactgaatacttgaagaatactacattttgagccaaatactcgtagaatacgtattatgctagaacaacggtaggatgtgtaggaatttgggaatacgttttcgggccgcaatactggattatgaccgtcatactaccggtattcaaatctaaagacacccctggatggtctacatactagttagatgctgacagaccgagatctggagatctctacagaccttgcgtactccagacataacgtgccatgttggcgaggctctctttgcctagtcgaatatcagcctctctggggatctcaggggcccgtccgaaaatgtggtcgaatggaattgtgatcgggtgctgcgagactgtgacgttgttcggtgcttttccaatcacgcaggattgcgtgacccttgggcgttgggcaccggcgtcccattcccacttatcgagtttgagctcaggtttcttccggttgactttgatggtgatggccgttttcacttggcctctgagggggtcgacccacatgcttgcgtcgtcgcgcaatttggtttcagtctcggaaacaccgacctcgaggaccaccccgggtcgtctgggggcaccacgagggggccgaagtgggccccagccccagtctggccgcttcacgtttccgtcgccgacgttgacattcacgttaccgaatccttcaactgcatcacagagtcccataggtagcaagatttttgtgaattcggtttgcagtccataggaaacttgagcatgctcgggggtggacattctgaggatcagggcgtgcaaggccgcgttgtagaataaactggtaccagcgagtagatcagagagcagaaagtcttgctcgaaggttgatggatcgatgaaaataacgaagtagtctgagatttcggacccgagtggttgacgagggggtaatttgtgcagacggtgcttttcattttgtaggatttgatcgaattgctctttccctttataggtgtatttgtttgtcgaaggaggcaggttgtccagaaagcgctccacatcactttcccattgagatccagccattatgaattatttctttcagtatttatttcctacgagtgtttagaagaaaaagtagataaagatgagaaaaaaggtctattaaatgaatcggagttacctcagaatgagcgcatagtatatccatcttgatatatagttgtattcaactcgccaccgcctctgattggccgaattcccaaatcgcaacagaagaacatcgagaacctacattttcaaccaacaacacacccaagccaaatattacaatccactcagtcgaacatcgcactgcaatctaaaaaaaagaagcaaacccctcatatctacgccaacacacaaaaccgatcgcccactccccacctcttactccgcacgccgcgcacgccgcacacgcccatctcccctggacccaacacctctacaagcggcacgccacacgaaaaggaggtagcctggatagtcgcgacctacggcattgcatccccgaacctaacccagcaccgcgagcatggcgggcgacgagtactccgtcggcgggggcaagctcaagctgaaggggagtaaagtcagcggagggcggatagagaagaaaaagaagaagagcgggaagaaaaaggagggggaagcgacgacgcccaagccggagtcgacgccagatacgaagcggccggaaaacgaaacagaggacggtgtgaggtctgaggaggatagagagaaagagagggatgcgcctgggaagactgaggccgagaagagagcggaggaggttaggcgcaaacgggtatgttctgttgttcttttttgtctttttgttgggcttgcgctctttctgcttcggctttgttgtacggggaaactgactttttgggacagttgcatgagcggcttcagcgcgaaggtgtcaaaactcataaggagcgtgtggaggagttgaataagtatcttagtcggctgagtgagcatcatgatatgtacgtcttgctctttttacctttgttgtttggataagctgacattttacataggccgaagattggaccgggctaaatggttatacggtttcacatgggtttcgatgcgatcaatctgttattcaagaataccatatctgtactattcaatacattctgttcaactgtactccgtaaggctgccatgtttcagtgatgatccataatccaggatactccactggagtataacgtaatcggtaagcgagtggccactgtaagcgagtggccaccccacccaagaggatannnnnnnnnnnnnnnnnnnnnnnnnnnnnnnnnnnnnnnnnnnnnnnnnnnnnnnnnnnnnnnnnnnnnnnnnnnnnnnnnnnnnnnnnnnnnnnnnnnnnnnnnnnnnnnnnnnnnnnnnnnnnnnnnnnnnnnnnnnnnnnnnnnnnnnnnnnnnnnnnnnnnnnnnnnnnnnnnnnnnnnnnnnnnnnnnnnnnnnnnnnnnnnnnnnnnnnnnnnnnnnnnnnnnnnnnnnnnnnnnnnnnnnnnnnnnnnnnnnnnnnnnnnnnnnnnnnnnnnnnnnnnnnnnnnnnnnnnnnnnnnnnnnnnnnnnnnnnnnnnnnnnnnnnnnnnnnnnnnnnnnnnnnnnnnnnnnnnnnnnnnnnnnnnnnnnnnnnnnnnnnnnnnnnnnnnnnnnnnnnnnnnnnnnnnnnnnnnnnnnnnnnnnnnnnnnnnnnnnnnnnnnnnnnnnnnnnnnnnnnnnnnnnnnnnnnnnnnnnnnnnnnnnnnnnnnnnnnnnnnnnnnnnnnnnnnnnnnnnnnnnnnnnnnnnnnnnnnnnnnnnnnnnnnnnnnnnnnnnnnnnnnnnnnnnnnnnnnnnnnnnnnnnnnnnnnnnnnnnnnnnnnnnnnnnnnnnnnnnnnnnnnnnnnnnnnnnnnnnnnnnnnnnnnnnnnnnnnnnnnnnnnnnnnnnnnnnnnnnttaaaaaactatcattcaatttgggattgacccagacgatatttataacttcgatgagactggatttgcaatgggattaactgtaacggcaaaggttataataagaagtgaatactacggtcggagatcacttttacaacctggaaatcgcgagtaggtaactgcaattgaatgtataaacgcggcgggataggtcctccctctgtgtattattttcaaaggcaaggtcttccttaaatcatggttcgaaggccttcctagtaactagcgctttaaagttagtccaaataggtggatatcagatgaaattggacttcgctggctttagaaactctttatactattaacttcattgtgtatagtaggaaggtatcgacttttggtactcgatagccatggaagccatttaacccctcaattcgattaaatttgtgaggaaaacgatattataccaatttgtataccactgtattcctcttaccttttacaacctctcgatatcggttgttttgcggtagtaaaacggtcgtacggccggttggttgagatgaaaatgcggaccgggatcaactatattaataaacttgaattcctcgaagcatacccctccgcacgaattgaagcttttaaatcggagacgattaaaaatagcttctcagtagccggtttaatacctttttcacccaatcgggtactttcaaaactcaatatttatcttcgaacgccaaccccccccctaagccggggtagcgatttaagccggaatttcaccccaaaaaccccttttaatagcaaagatctacgtcgacaggctttgtctattaaagctttacttcgaacccaatctcgaagcctaataagcccttctaaacgtgcattaaaccaacttatcaaaggctgcgagcttgcaatgcatagcgctattttactagcgaaagaaaacaaggatttacgggatgaaaatgagaataagaagcaaaagcgggcccgatctagacggcagatacccgccgaagaaggcctctcagttcaagaagcttctgaaatcattgctaggctggtggaagcattagaaatacccctacaccccccgggcggaagcactcaatcagggttagaaccacgaccacgggctgcaccaaggtgtagtgggtgtggaaagacagggcataagatcaataggtgtccagataaatgatcttttttagtttaattaatttaatggcgttctggttgaaatatttaccttagaaaactatactcttgggtagggtggccactcgcttacagtggccactcccttaccgattacgnnnnnnnnnnnnnnnnnnnnnnnnnnnnnnnnnnnnnnnnnnnnnnnnnnnnnnnnnnnnnnnnnnnnnnnnnnnnnnnnnnnnnnnnnnnnnnnnnnnnnnnnnnnnnnnnnnnnnnnnnnnnnnnnnnnnnnnnnnnnnnnnnnnnnnnnnnnnnnnnnnnnnnnnnnnnnnnnnnnnnnnnnnnnnnnnnnnnnnnnnnnnnnnnnnnnnnnnnnnnnnnnnnnnnnnnnnnnnnnnnnnnnnnnnnnnnnnnnnnnnnnnnnnnnnnnnnnnnnnnnnnnnnnnnnnnnnnnnnnnnnnnnnnttacagggcccactcgcttaccgattacgttatatcatgtgataataaggggctcaagattcaataatatgtatagttcatggctaaaatgaccccaaagagctctatttagcagtccccgaaaagtgaagaggtatgcccaaaatgcgaaagaataaataaatgataaatatcaaaagatcaaagaaaagatgtcaacaccaagcacaacgccatgcaaatgaattccgcaaaggctcaacccaaaataagccgcggccaaaaaccgagtccgatctagatatagatcacgaataaccgaacaaaatagaagaggagaccaagcccaagaatcgaatcagagaagagggaaaagaaacaccgcgctaaatccagaatcaccgcagaggcgcacaagaaagggaagaaccggatcaaatgggaccgaatcgaagccaagccaaggctagcagggatagcacctgatcggccgggggcagataagaacagataggggggaaagaggaggcgagatgggtccgagcctccatagactaggcgggcgatccttaagaataatggcgccatccgcgcccccctttgtccttccagccgagagaaaagcgacgaaaggatcggctatttctcatttctgattgtggttcccggtctcatacgcccttgacaacgacggtgcgttcgctgttcagcttgtcggcatttcgagcgtgtgattctttcttgcagtcctccaggccggtgcaggagtgggcttctagcatgcggtgcttggagcagaagtggccggtacagaagctgcagtcgccgacgatgcgctgggcggcttccttgcactccttgaagttgcaacggggcttgcggggaggcattgtggttgggagtgttggggtagatagagcggttgagaggttgaatgtaaaagtgtcctttcgcgaaagacgaaagacaagagataaataggagtagcgaaggcgagacgctggggagaaggtttgagataagcgccggtttcaagtgcggaggcgagcgggggaggagagactctgtcgaagaaagtagtaaaagggggagggagggaaagatgggccagcacgaccagcctatatatagggtaaatcggaagacacgggagaaagccaaagaaaccgacttccaaggttctaaccagagacgggggggctgactcagtgaggcgacagtgacggaatcaacgagtggagttccaaagttctgttgttggcgatttggggatttccaagtggattcgggtgggttttagtggttttagtggatttggcattcaatcgattatttcgaattaattggatttgatattggaattggaggttagcggttatttagtgcagtgaggtgattgaactatacctgtctatctatgttgtatagttacagagttttaaagtattcaatattgatcttctcctttcttcttctttctttttttctttttcttttttccttttctttgactttaccaaattcctctgcatcccacgcggacgtatcacccaggcgcctggtctcgggcccaatgatcggaatgtggaattgcccgtgcatccaagggcgcctttcacgtgatagtccagtcaggtgtcgcaaactaatatagaaagtctcaactcaaccaactcaaccgatgcgatctcagatcctgtttgcgccaccagagtggcaaggtgttcacccagacttctccgactatggtactccaggcacctccattaccaactatatcatcccgaatataactacaatcagtgcctaacgacactactcccactcaatgcaatgcaaacaaaaaaccatgcaagtcgaccaaaagagctctgacctcgagataaaatagacgagtcgtctgagccaagcccggcctaggtacgacggatgatccgcgtggagctattgcataaccagcatcggtactccgtaacagcatatgcagaggtatggagtaggtacggagttggtgagactaagagaggaggtgatgccctataactactccgtatactccgtacatttcccggtttaggcctaaagtgagggccgatcccgctacccaatttcaccgtctcctctcctctccacatctccccaccgtcgctcaacgtagcaggacgctacgccgtatctgctcacggatccctcgctgataacacgctagacggtacaaatcagaatcctaccacgttggcgtgctctacacgggccacggcctacgtggtcatggtcaatttaaaatagtgactagcgtgcagcgggattggtttcatgatatttatccactggtaaggttggacaagggaaaaagaaaagggaaacgtaaatgtgaatcaaaaacccgtggacgccggcgcagacgccgatgatacgctcaaacccccttgcccggcccaaatcgcaaaaggtaaaaacggaaaaaaggaaaaaagggcgaggaatcaaatcgcagcatcgcatatcgcatatctcatatcagactccgagctcgtttgccttgcctgcatccgggtccaagtagtcctctcgctccgctgcctcgtactcgccgatcagatccatcacaaccgcccgtgcctcgtcaaattcgccaagtccgtcagcaaacggagcttccttcttgtaggaatccaagaacgcatttcgcttgcggagcatgtcgtagtgcttcacaatgcgcttgaagagtgtcgcgacagaggtgtggttggccagcatcagcccgctgacgcgatgtccggtttcctcaatatacggcgatttctttgtgagagccacctggatactggcagggccccaggggatgaaggtagcgaggcgacgctcccggatgcgcaggagtgacttgtgcacgtcggtcgggtcggcttcgccctggatgatgttgaggatgctgatgtagcagctggacttgctggggttgaccgagaccatgcggttcttaggctgtagaagacggcgcatgacgtctaggacggtggtctttcgcaccgtcctggcttgctcgatgttggcgcccgtgaacggtgtgtatgatgtgagaaggaagtggctgcgtggcgtggggatgagcgaggcgatgatcccggcgagatcgttgtgcatgtatccagggtatcggagcgtggttgtagatgcagacatcaccgtagaaacgagttggttggtttggtggaacgagggctcttggacgtgcagccgatcagcgacaattcgtgacagagcgccattgtccaggacgaccacggagtcggcatcctgggtcaatcggcgcatggccagcaagctgttgtaagggttgacgacgacatcggactgcgtgtccgggaagacagagtaggtttgaatgagtttcttcgggaatcgatcgttcatgcgttcgaggatgaaactacccagtccagagcctgttcctcctgcgatcgaatgtagaagcataaaaccctctagtgagtcacttccgtctgcttcgcggtcaatcatatcgaaaatctcctcttgcacgccctcgcctgcagcatatccggtaccccaattgtttccagctccgataccttgttgtccgacgaagaagttctcggggttgtagatattcttgtaggggccagtctggatggcgttgaggacctggaacaatatgcgttaatcatcgtggtcgatttgatatatcggtgaggcctaccctgggttctaagtcgaggagaatcgctcgagggatgtaccttgtgtcgtcactctgccatatgttagccagtgttcttgtccaccaagcctatattttcctcgcaagcttcctatacacacctggtagaagaagacatccttgcgatcaccggccgccccgtcagtcgcatgctcctccaggtttccatctgcgctgatcccgtgctcctggcacagctgctgccagaactggctgccaactagatagaacgaatgttagacgtgaactatagtttctcgtgctccgtttcaaatgactagatcaacgatcgtggaatggatcgcagagttgagccacataccgttgttgccgcactggccggcttggattgtgatgatttctctgcaattgccaccaatatcagcatcggtattcaagctggagagagacctctcaattatgcttgactcggaagaatgaacaaaccttggcatcttttcttcacagaagccgtcgagtgttgctgctcgttaacgcgtatcgcgtccacgcggggaactttttggccgatattgccgcctcaggcagaagctcttgccaccttatgtggacatcaacaacgttacaaaggcctgcaaataaataaattcgcgcaagaatgagagttgattatccgaaatataaatgctttttaatccgcccagctatgctaaaattttgatataaccgtcttccctaagtggtctacttggccaaccgttgccctggaccactagaatcctgccttcaatgctgtgatgaggttgccagcaccggcaaccaccccgtcgacaatccgtacacgtcggccttctgtatctccgtattcctgagtacagccctcccgtaccgcttcctccatgccagccataccagcacagcccagacacacaaccttaacatgagattccgagttgcgaagcaggttgcgggtggcatcgatgatccgccggcgcacctcctccggctccgtggtgtgcagctcaacggctgtcaggccggtggtctcaacacccgcaaagtgtatagagctcccgtcctcgaagtcgtaacccagcgctccctggactgcattggtgagctcctccttccacgcagagccagtggtgacaatgccaaagctgcccttcccttggtacttgtgtagcctctctgctgggttgattggatctctcaacgtgaacccactaaccaaggagagcgcagcggtgagggatgcttcaaagattccagtgacatatctatttctcgtcgagctcgtttcttcgcttgccgtgatgtcctccctgagtctgccgacgaatggatgcgcggagtaacacgctacgagaaaagcgtcgtaattgccgataaactcccgtacgggccagcaattcaatgccgatttgcacgattcttcggcgttattgatgctggcgattggctcgatctcgactccgtcgatatccagggtggagtctggagcagtgaagtattcgaagtgcacgtcttggtagttcatgctggccaatataggcttcaggccttcggtcatatgcgttgaggtattggggttgatgatcaatatgctgtaatcccgttccccttttctcggatccagctggatgatctcgtttgcgccatatcgcggctcgagaatgggactcatttttccaagaatgaggtgaattgaatacacttggctggaaagacaactccttgctctccgggaaaaaaatgtccgcggagaccgcaaacagctccgttatcggttatcggaccctccacaaccccaccatctcctaggagcttagcggactacttctccaaaagtcaatggcttatttatgcaatatgcttcgtggcttcggctattacatgccgaacgagctaattttcttatctaccctctcaaggaatttattcgttccaaggttatcaatcgaaatggcttacaaatccaattgtgccaccagccctccggctctagcactagtataagaaccactccacccagcaaccccgccgtcctcgcacgccatcctaccttcaacacacctcacctacgcagaggaaatttcaattcccatcatgcctctgatcgcacagcaactccagccgagagtgattctcgggttgatgacctttggcccaaccgaggccaaggatgctcgtatcacgtcactggatgagttcaataaatgcctggactacttccagcagcaagggttcaatgaggttgacaccgctcgtatctacatcggcggcgaacaggaggcattcacggccaaggcgaactggaagtcgcgtggactaactctggccacgaaatggtacccaaatcagcccggcttccacaagccggaggtcgtccgtgagaatttggagctttctctgaaggagttgcagaccgatgtggtcgacattttctatctgcatgcagcagatcgtgccactcctttcgctgaaactctggaggctgttaaccagctgcacaaggagggcaagttcgtacagtttggtctgagcaactttacagcctttgaagtggccgaaatttgcgtcctttgtgctgaaagaggatgggtccgtccaacagtctaccaggccatgtataacgctattagtaggtggtgtcctttctcttgttttcggtcatggccactcggctgacagagtgatagcacgtaacatcgagactgaactcgttcctgcctgccaccggtacggtcttgatatcgttgtctacaacccactggctggtggtattctctccggaaaatacaagtcgcaagatatccctgcggaaggcagatacagcgacgcgggctctgcgggacccagatatcgcaaacgttacttcagagatgccactttcgaagctttgagtatcattgagcctgtcgtagagaaacatggtctcacacttgtcgagacggctttacgctggatccgccatcactctgctctgagaatggataatggcggtcgggatggagtcttggtgggagtcagcagcttcgagcagcttaagactaatctcgccgatctccagaagggaccgctcccagaagaggttgtgcaggctttggaccaggcttggttggttgccaaggccacttctcccaattactggcatctagatctcaagtatacttatgatactcagaaggcggtgtttgggcctaagtgagagaaaagggaatgttaagattttccacaaggtccttatatgaatagtacatagttagtgagcaccaatgagaattcgaggaacttggatgctacccaatgagcttcatcgtcctttaaagatcggagatggactaagaccaaacatttgacaatcgtggtcagattcttcatcgttgggcaatatatcttaatacatatcgcatcgcaaacgaattcgcagaccacgtcttctggtctaatccaggggcattgcctgcctccaaatccaaaaatagccgaatgacatgcattcgctaactcgaatccggcatagcgtgcgccacgatcgaaatcatgtgatctggtcagatccagtgatgatgacacctgaaagcggtcatttcgatccgcctcatcggattcttgaccatcttcaccccgagtactctcttgatgcaccttgattatttacgatgcaataatccctactcagtggattgaacccactattcgagctacaactatccctgatcggtgccgagtcgcatatccgaggttgtgcagcatctattgaacacgtggaataggcttcatgggtaaccttttctgaaataaatctaccctcgttatctgcatcatctggatggtggccttccaatagtccacgcattggctccttatacctatatctcgccggcacagtaaatcggacaagaacacccctgacggcggtattcatgtcgaggtagttaggccgactagcaccttccctcaccatcgccgttgtggcttcggatagctttgagctctcagagccgcgggtgacctcaaccccggacgcagtccacgactccgactctgacgacgaaatggttgtcaatcgccccccattacaccgtccaaccgacggccgctcgcaacagcccctcctcaaagatgaccgtcctcgctcccgcccgcgctcgagcttcggtaattatgacacagaaggccagcccatgctgcatgaatcacgaaggccgacaattcggagtaaaagtccggaacgcgacgctgccctggcaacccgcaagaaatatatggttgcatcggggttcctggtgctgagtctgattagcttcgtggtccaaacggagaccgcttcatacattcaaaatgagttgcattggaagaagccgtattgcatgctgtaagtccgagcgcaaagatagcgacaagcccatgcggaacctcttttccggaatgtaatcgcttaccatttcctttccctatgcagctatatgacccacggatcgtggtccttgctctggctggtccagctgggtatccttcggatacagaaacggaagctcacgtgggatgttttctggcggcgccatgtctttttccttcgtaccactgcgcagatggtagaatcgcaggaagtacatctgagtactcgcgcgtccaatcaatcgccggtccgctatatgctgaagaccaccgcctttgtgactactgctctcaccgtcgctggaggatcatggtacgtggcagtcaacatgaccactcccagcgaccttacggcgatctataactgctcggcgttcttcgcatatgccttttcgattccgctattgaaggagaaactccgaattgacaaggtcttttccgtggccgtggctaccatcggcgtcatggtcgttgcctatggggatgggcctcataagaaggtcccgaaaggaggcacagatggcaacgggggacagaaccgattggtcggaaacattgttatcggcgttggaagtattctctatggcctttacgaggttctctataaacgctttgcctgtcctccggaaggtaccagctctggccggggtacgatctttgccaatacttttggcagtctaataggggctttcaccctgttggtactatggatcccattaccatttctgcactggacaggatgggagacatttgaatggccgactggcgaagcagcatggatgctgctcatttccgtgggtgccaatgctagtaagtaccacaccagcgttcaaagcagacacagaagctaacactaagatagcgttctcgggctctttccttgtgctcatctccctcacatcgcccgtcctatcctcagtcgccgcgctccttactattttcctcgtcgctctggtggactggttccgaactgggaactcactttctctagcctcgattattggaggcgtcttgattacggtggcatttttcatgctgagcatcagcacgtatagagagatgaatgaggagcggaagaagcatctagagaacgatgagatcgagtctgacagtgatgcatagatggatccacggaggtgtgcttcgggatgttttggcatacagcattgaattagtattcagcgtttctgacgtataaacttctaatcttttcacacgctatacttgcttcaagccctgtagatgcgcttaaacttcggccctataattggggctgccccagattagttccatggttcagtgttcgatgtatcgacaaagacccaactgtgacatcatgaaatttattccgatcattcaactcgggtatgtccgagtgagtttttctttacatcgagccttggaaggcagatgcgtttcccgtggatatggatatcggcatcccgcacctccggactttaagattaatgcaacgtactcgcatatatacttagccattgtatgatggcgaatcagatccacagcgcaaattaatattcaatgatcatcgtgatagtcccggtgcttataatgtatttatacatatagagttcttctgaatgtaaattactccgtcgtgcagtaaaatcaagaaaaacggtgagcaacaagcgcgagctgctcgacaagtcagcttttaaaggcgtggtatagatgcatatgcaggccatttcgagatccaaagccaggatcagccgccccaattgatttcgcgatgatcagccacacgatgcaattgcaggtccgtccccgtcaaagctgtcattgttattgggctaaacaaagaaactggtccaccgaacgctagggggggataatgtctcacagcgccaggggagtccgtttgtccgtttgtcttggaagtaattttcaccccctgttaaatggcgctaagatatgtctggcgccactatttatatccgatctgcctccacagccaagacaagcgatggagagtgcaagctcggtttcgactctggcaatctcctggcattcacagaggaaatatgacttcggttagacaatccacgagcaattcatgttcatgcattcgttttcaaggcccggccctggctcggcattcaacaccgctcccccgacaatataatccccttgacttgcagcccccccagcgtggcgcactatccatccgggacccaccaggtcaagcgagatttggatggtcacttagaccaagtgattggcagtgacaatatccacttcgtttttctccggatgcgccgccctgttgattggtgccttgaggaccccaggattgaaatacctaggtgccttgattacaggaacggtataaagtacggtggatgcgagttgaaccacttttcacgggagcaccgctaaccttggacttgatacgggtatggtggcaactacggagtaagtcatgacgtcctctacttgaagatttgaagatattattcaaagtgaatagtaatagttatagcgaaaagttacattcctcagagacagccctgtccttttgacagatgtcaccgaaatgtcttacctgcatactgtattattccttcatatcactaaagcagggttaatttaccctggcttgcgtctaggcaactcctaaccatcaaccataacttcgtatgtaatctcatcgctccaataatcggcggtgattggtttgccccccggatggcaacgggtgataccgtgtatggtaagtaacttacagctccagattcgcatctaggtttcccccctcccggatttgttgttctctttggcttcttcctcttcaacctctctacgaccaccttttccaccctcccctctttggccttcgtcgtggccgtccgttcattttccatacttttggataccggtggtcgcttcaatttgatttcactcgttccttttctgcctggcgcggattcaatgaccctccaaggtgcttgagcttgacctccagattcctagcctttctcttgctgaagggaaatcggtctggaggtcttgagcccatctggatcttattgggctttcgtcgtcactccgctaaatttctttattaccgcaccttttttttattttatttttctctcctcttggaatcatggcttcgatttcacttcctccgcagtcccaggcgggcttctcgccacatttcgatacttcgaaccactccaacaatcccgatcccgatcgtcaccaacacatgcacgcaccattgcctaatcccccattcgtttttccagcacgggaccccgatgcccccacccaatcaaacccccctgagcgccgggaacgagccgcattgcccgcattctcttttaatcccggatcggaagagcagtccccacacctttcagcgccctgtttatcgaatcctcgcgcgggtggacaccgtcggcgaccgagtgagtttgttggagacttcttggtaacaccggaatcagttggaccaggtcacaggcgggcggcttcgatggcagatcaacatattccacccccaggaccgggggttggtagagttcctggacgacggaaccatgcccatcgccgttcggccgccatatctaatgtcgacttgaattccatcaccaaggcgcttggtcctaattctgggacaccaagtgcgccttttacacccgccgaacctaaccaccaatctccatccgatcttccttcccgaacgctctctcaatccgctattactctcggtcgtcccacgccgcctgcgtctccacaattccctcccgttcctcctgtaccttccattccggtttccattcaagtggaaatggccttggacaaccagaattcgaatgccgaacgaccagtctctaccgtttcgcatggtatctccgatattgctacaactaagtcacaacaggtggagacgccgactctctcagatcaggtaacaccaagacccgattacgaccgaaaacctcgaccaaaaaccgcggatgcctcttttgtcatggattttatgcagatggatgacgactccggatctatcaaacgttcgcactcagccgctgggcactcccgctctcgaaagagcaaatcaacaccgcatctcgattctactctctcgcccgatgatattcaatccgcagaccactaccggccttcattttctgacactggttccgacacatctggcgatgaagcaactgagcattcgtccgacaacaaatcccctgtcaagtcgaaaaagaagaagcagaaacgggttcgctcttgggccggtcacattctgactcgatccaagagcaagggtaagggtaagcgccatccaaaggttcacacagaggaggagccgcctgtacctcgcgctccagcacctcgtccacctgctcttactcggaccgtctcgggcactggatcggttttagatgttgattttgataatgacgtcgttgtcatccggactccgaccaatccaacgatgccttcttctgcgcttcagcccattcaaaataacgataccgatggttgttctttgcctgcgcagtctctagagagctcatggaaaccgaggagtttctatgaacaggatgttggctcccacgacaatgtactaagtagccctgtcatcgacctcgatgctgcgcttggtcctttcaacactccagatatgcgacaaactactcagggtgcgcccaacaacaacttctcagttgcgacacagcggatgtacagtggcggaagacgaggtgaatttgtcggcccagagatgcggtaccatcggcgcacggaaagtgcaccggcgcttcaaccatttgaccgcactgctctcggcgcattccgtctgggtccgactccggcggtcgaaacgcccgatgtatttgacgaggaggaagaggatgctttcttggctgcttcccaatcgcccaagggcgagcggcttccggtgaacgcgtcaccgatcgacaacgcagttttctcatcatcggaggacgactcgaaatctattcacagcaacgctacctctggcagtagtgatactctgactcgtccccccaccggtagcgtctcctctcagaatgctggcttaggcattcgacaaggcgataaacatctgagccaggaacaactggatgacagaagtgtcctcgagcaggtacacaatgccagcaatcctttcgccagcaagcctcgaacccccgtggaaattctaaagatggaagaatctgggcataaattgattggacccccaagtcccgacatttctcctcgattcctagctgtcgacaagcgaccagcaacctcacccatggagttgctgcctagcattccgcccttctctttacaaccagggatttcgccgtctgactcatctttcccgtctccagatgcttcgcggtcaattgcggcatcctcaactgaccggaacttttccagccactcatatcatcagcttccttcggctgaacatccttacgcatcggttgaagatgttccatctttgaccagtagtgcatcgaccatgaccaacactttgaatcgtttctcggcggcttctttctttccccgtgggcgtctttctgatgaccgcgcagcgtccttctcagcttccggtacccgacgcacaagccaggctaatgcctccaaacgctctagtctagctagcctttccaagctggtcgtcggtccccattcggagcggagtaagctcaatcaggaggagaaaccccctagcaactcatccgacaaaacgaagaagaagggccgccgtctcagccgaatgatgcacttctggaaacctaaggacaaagaaaagtcatccaatgaggcggcaccagcaaacgaacggtcgcagtcataggcgcgcgttgcgtattggttttgatatttttttttcgatttacggcgcaacctcggcatagcgacatcctggcaattatttttgagacatcacttcactccccttttcttccttgcccgcttgcgatagcgtgggcgtcttctttcacccgatttgtacatattttattcggttcagctttactgtggattctttttcttcatcttcattggcggttctatttctgcgtcctccacctagacgctcattacgaatttccttgcctctcaagatgtatgtgtcttgagtatgatctactcttttcttgtcaatccttatgttccggtgtgggtgacgcacggatttattgactctctctacgatcgttgctcctctcaggactttttttaccactttgtttcttttgctcaagggtcttggcctgggatatcattcgtccccattggaacatccattgggtccttctttttccatatctaggacatggctatctgtgtatctattgtgtggctttcgtgtcttccactgttcaggtgtggcattcgtcaagaatttgtctctgtccgattacacagatcgcggataatgaaacactctcttcaattatatgtcatagtttttgtaagattgaatgtttatttcgtaggtttggttttaggacaatttgaaatgttgcaaagcacacgtagccctaaactccaaagatataaatggaaaccactacataatcggaaggatgtgacgacatatatacaaggagatgatgctgtgatttttcaatatatattgaacatcggatatatcccttcccttaatgatctgaatccctcaaaggacacagtttgtgcacaatgaatcgaatgaaacatatcttacctcactttcgagcagatgggcacattatcgtgatcgtcccaaaggatttgatatagttattgctggtgacttatcccttgtaggagtagtagtataaagtaccttttgtagaagctcatggagttaaatatagaaacataggagctgttgatctgatctgattcaaagctagaagatctgttcagctttgtgccatggtcgagtttctagtaaaggctgcaaagaccgggcggtgaatgagtctagttcatttactaaccatctcagtcgttcgaatcacctaggcatcttcatctgttagctttgcaacattctgcatgatcatacgacctggctgtggaggagcttgcaatgccattccaggaccagaatgcgaggctattcggacttccatgttttttttcccttttggcaacctccatgacttggaagttcgcacaaatgatcaccacttcgaagtctcaaattgaagcaaaagctatggcaaagagtcaatatacgaagggagtgcccaggcacaggcctcaaccctggatgcccaggtgcatccaccgtcttacctaagctccacgcgcgggagagcttgcccacgggtggacctgagctctccccccatagagatgtcggatctgcaaccatcttgaagctattcaatacattcatcattcagccagttgaagccgttgaactgctatttttagaccctgctctttggcttcaaactgtgcgcctaaaactacttccagcgactctgctagggttgttgaacttgtcgctttcattctttgcgtctccactaccagtgtttcctacactttgagtgacgtcgattgaattttatgccttttctctgcttgaaatcacgaattgatcgttcacgtcaataaaccaatccagcagcacttgatactcgatctacacgtgtcatagtgaaactcccgttaaacacaatgtctaatggcggtgattcacagagagtgcctatgtcccaagacgaacagtctctttatgttcgcacacaagagtacgcagctacgccgcgatacccaactgtgactagacctattgggcatggcttctacgggggaccagacatgattgacgatgacactgtaatcgtcgaccagaaaattttagaccgcgaatcccacgagtttgcagagggcgactttgtttgcccaggattcttcaacctcgtcgatctaggtgggttcacccgccgcttcaacccctctcaatggaaatacgatatgcgtcgccaggcccagtccatccttccattcttatctcttggcccttcatcatgtctacgtgatcccgaatacatccgcaaccaagagttcacactaattcttgctattcgaaaccggtactctgctcacgcacgcctcgtctcaggcgagaaggcggccgccatggtcggtatcatggcagacacgattgatgttcttgataaccaagagctcatttctgcattcccacgcgctatccgccgcatcaatgatcacctggctggtgtggatgtaggacccaatggaacggggtcagccagctatccgaaaaggaaagtcctcgtcttctgtgaatccgggaatgaacgctccgctgctgtcgtcattgcctatatcatggctatgctcaatgttctgtctgtcgaagccacgcacatgattcaggcgcgtcgtttctgtgtttcaattgaggaaaatatgaaatacatcctcgctactttcgagaccattcttgctgctaagcgtgatgttgagcgtgctaaaaaaatgactgttcatggcgctgcgagtcttgcgccgccatctctgtcgccaacgcttacaaagaagcgaagcttccacgatcagagagatgatgatattgccatggatgagggtgaaatggatatggatgaggatgaggacgccttctatgaccgaaagccgaatgctcccttccaggaccgcgtagtctagggtgagccgaggttgtttgtttcgagtatctttgggatgtgaatggcactgtcattcatggagatggggagggagatggatacgctgaaagatgaaagggaatgaagggaattctttacattgggtagagtagggtgggtatctgcttttctttttatgtctgctttgttgtctgctttattgcttcatggttcttgtgtgcaaatacccagttgcagttgctcattctactatttttccgacatccaggtcattcactggccattgcattcttataactattttcatattcgtaagagcatacacatggcaagaattcagtctagcatacgtctacagatttgtagaaaaatcaatgatggggtcaatatcaaaatctggcaagtctcaagacacgcggaagttgattgccctcaagcatctgacccagcgtttgaactcaccttgtcgattctcgactcaatttgcccctaccttgtgttttcctttcaatctgagagctcgagtctcgcactgattttgcgcgacttcaaagccatcccaattctcccttattctctcttctttcatctcgcgcgacaacctttccatctcacgatcatcccaccacgatcacccatcgcatcctacgatgaagtgcatgcttcacattgacctttagcacgtacctaccatcgatacaccccagctaaccatcaatcgcctcacacctcgtcccccacctcgctcctcgccccaacgcgccgccaaaatgagcagaatgcgactgcgcgacagtatccgcgcgccagtgcgatatggcgaggatgaatacgaagcatcgcgggtctcgctgcgccagggatgcgatgactccattgacgactcgatggagcttggggaaacaggtaaaccgcgcccacaacaggggcgcaagccaaacactgtgccattcaatcccaacctgccacccgctgcgtttcccactttgaacataccacagccaggtcgtggctccaccgtctcagcgcataatcgcggtgttggtggcagccggcagaacgtacacgcaagcgaagctacatctgctttccgcaatgataggtcggtcccgtcgcctccgtctggaaatgaagaactctcgatggacgatatcgacaaccacctcgccagtaacaacatggacaatccggtgtatgcgaggaacgtgaatttggcgcgcatgagtgtggatgcctttccgggttccgaggacattgacatggacatggccacctccccggatagtgatgacgacccactgccagatgcgactcaggtgctccttgatacggtaagtatatcgtgtcttttgctgtgttagtacaattgaacgagtctgatgtgtgtcgttgttttagatcccgaacccaaaatggggtgatctgcacaaggctatgcaagtcgagatcatcgaaaacataatgaagtttcatagctggagacgtgtttgcgaccttcttgggcttgggctagacgaacgaaggcagctcatgattaacataggcatccgcaataaacagatcgaaagggagaatgaaatactggagaaaatgcggcacaaacagcgcagggcgcttatgagaattgataacagcgacttgaagcttttcaagccgccacctcagttggtgctcaaaaggatcacccgagaggcccatcagaacctgttggtcaccggctacacggacctcttgatgtgtcaatcccacgagttcttgaaagccagacagttcctgcatcagcacgggctacctcgaagatatgctggcgattggggagacagcctggtggtgcttcgagaatccggggagcactcccatgagcccgatgagttcgaatggaaagaaaacctgagagtcactccacctcccgatgagaccgaggacataatcaatcctttcatggacccagccagtagggctaagagccaattcattcaaagcattggtatgcacggcacaataaaccccagggatttaatcaaacgcgacactgacccggctcccatcgtcgactggggaaagtattataaacggaagccggacttgtcgtgggacaccacaaagcaccagctaaatggattggtcaaggtgaaggtcggtccacacaacgcggcacggatccaacattgcacggacgccggcgtcgagctccaaggactgtcctcccagacacaggtgaccgccatgccaggatcacttccgcaggggtccctacaagacacaccgtccaaggagccgcggaatgcgagtctcgcccagccctttttcagacgacctgctagacctttcagaagagtcctcaccgactggtcttcgccagttccccaccaatccgagagccaatccaagtatcgtcgagacatacagcaggctaagcttgagaaactagaagcaaaggcagaggggctgcgccgtcgatacaactaccagccaaacctccaggttaagggcgttggagttggaatcagtcccgcacgtggaaccattcagatgatgcccccgatgcagccagtcgaggaagagacacattcgaaattattcgcccggacgcaccgtggaatgacaaatatgaacattgaccgcctcatggatgagtttatcgagctgcccgaggaaagcgagcccgagctacctgatgcgaagccaacttccactgatatcagctccaccactgaggtgtctatggatgatgtaatgctggtgccgacggatggctgttcctcctctccgcagtagagggatacaaccacgagatatggaacaaacaaggattcaaagatatgagaccatttcttcatctgaaccatcttacatggttcctttatgtaagattaataatgtatgattgtcttgaatgatgttgaagtgaaatccgtagttcctggacgtctaatctaaacctggtccgtgcgtcgaacgcgaaatgccgcgttgaggacgcgctttacttcgatttccgatatatcacaaactgccgtccaatcgtgcgcagttttcatccaatctacgagtatccatttgttggaaactcgtacatacaatatcccttggtatcacattcgtttatctctcccctcccagcgcaacttgacgttgcgaaaacttctgcacccctgcgaatgacgtaccatctccatccatctagtactcgctttagatcactcacgctctttatattgtgactcaattctatcagacagaatgtctgttgaagacacagctactcccacggattcccgtgcggggactacggcgcccgaatcggtcattccttcgtcgccgctcacagacccaactgaggctgactcgaagtcttctcatgataaagacgacaaatctaaagcagatttgaccgattcagaagatgttgaggggatggatagcaaggccaaggccttgatgcacttgttgaaaaccagctccgtatgtccaatccatcctcgtcgtatctcatcaaatagtctcatatcttctcgtacctgcaggtctttgtcgctatcatgtcagataaaatgaagcagcaacaagaggacgcacgcttggcagcgatcaagcacaacgaacaagctgccgcgagtcagaaaaaagccaagtctcatgctgaatctgctcgccgaaccactcgaactcggccaactcaagatgcgatggaggagaagacatcctctagtggcaagggcgccaaggaaaagaccacaggatcgactagaggtcggcctaggcgggcagccgccgccaatggcaggcccctttttaaattttttcannnnnnnnnnnnnnnnnnnnnnnnnnnnnnnnnnnnnnnnnnnnnnnnnnnnnnnnnnnnnnnnnnnnnnnnnnnnnnnnnnnnnnnnnnnnnnnnnnnnnnnnnnnnnnnnnnnnnnnnnnnnnnnnnnnnnnnnnnnnnnnnnnnnnnnnnnnnnnnnnnnnnnnnnnnnnnnnnnnnnnnnnnnnnnnnnnnnnnnnnnnnnnnnnnnnnnnnnnnnnnnnnnnnnnnnnnnnnnnnnnnnnnnnnnnnnnnnnnnnnnnnnnnnnnnnnnnnnnnnccgggggggcgacccgccgccaatggcagctctatttctaattatttcaagaaggccgacgtggaagtgactgaagacaatccctcggtgcagcaagcccttgagaaggctgcagacgactacgaagcaaaccccacggctcttggtgagcagcacttagtcgcgacacagcagccagcacttgtgagcggtggcaaaatgagaacatatcagttggagggcctcgaatggctcaagacgctatggatgaatgggctttgtggcattcttgccgatgagatgggccttggaaagactgttcaagcaatctccatgattgctttcttgaaagagaagaatgtttcgggtccgttcttgattgcagcaccgctgagtacggtgagcaattgggtagatgagttcgcccgatggaccccgggaattaaaacgatcttgtatcacggctccaaagatgagcgagctgtcatgcgcaacaagcacatgaaaatgaaaaatcagggagatatggacttcccagtggtgtgcacatcctacgaaatctgcatgaacgaccggaagttcctggctcaatatcaatggcgttatattgttgttgtacgtttgtttcaatccctttcctttacaacatttacacgacactaatcgatttataggatgagggtcatcgcttgaagaacatgaattgtaagctcatcaaagagcttttgacctataactcggccaatcgtctattgatcactggaacacctcttcagaacaacatctcagagttgtggtcacttttacatttcctgcttccggaagttttcaatgacctcaactcatttgaggggtggtttgatttctcctcagtcctggacaacaagggccaggcaaatcttgttgaaaaacgcaagcgtaacttggttactagtatgcatgccatcctcaagcccttccttctgcgacgtctcaaaacagatgtggaaactaccctccccaagaagcgggagtacattttgtatgcccctctgactcccgaacaaaaagatctatatcgggagataatcaacggtacagggcgtcaataccttgagggaaaagctttggagcgactggagaataagagcggcagctctacgcgctcgcaaagtatgaagcgcaaacggagtagcgatgatacaacgccggtcaagagcgccagacccagcgggacatccacgccagctagcaatagaaataattctagccgccgttcccgacgcaatacgcgtcagagttacaatgatctaagcgaaggagagtttgatgagcacctccgcaaactcgagctgggaattgaagtagatgaagagcaggtcgatcccagcgatactgagcttgaagagatgcagcaggctgagaatctgaagcttgctagtacgtcattttcagatcattttttggtttttgctaatattatcttgcagagaaagagattgggcaaaagaagatgcaaaacccggttctgcaggctcgtcttgcctgcaattctccgcacaatttctactggccttggatggacgagtcctcttctgtagacgaaacactcgtctccgcctctgggaagatgcttttgttggaccgtttggtttcgtgtttgctgcagaagggccataagatcttaattttctctcagttcaaaactcaactcgatatcattcaagagtgggcaacaacccttcggtcttgggagtgttgccggatcgacggcgctattgcacagtcagagcgtcaggctcagatcaaaaacttcaattccaaaaagaatcacaagctcttcctcctgagcacccgagctggtggccaaggaatcaatctcaccgctgccgacaccgtcattatctatgattctgactggaatccgcagcaggatcttcaggctcaggaccgagcccaccgcattggccagaccaagccagtgattatctacagattggcaacgaagggtacggttgagcagacactcctcgagaaagcggattccaagcgccgtctcgaacgtctggtaattcagaaaggcaagttccgctccctgctcgaccccagtgcgaattcccaggatatcgaagaactgcgcaaggttcttggcgagaatgaattcgagcggttcgacgttggcgccgaccctgcatcgatcttgtcgaatgaagatcttgacatcttaaccgatcgctctgaggaggcttatttgcgtgctgagaagggattggatacgaaaggggatgcgtttattgcggttgaaacgaagcgcgatcctggtgagagcatcctttcttgagatgtttaatggctgtctacattatttcttctcttccatccaagctacacgctggatgatatctagaggttactggatggtacccatatctattggtcggctagctggtttggttggcgtttacctacaaggtcggatgggtggcttattcgtgtatgttccctagtctagatacctagaccattgctattataccgtatgttcaattatttcaatgtttacactcggcaataaagattatgcagtgccatttatatagagtggcataaactcactgtagtgcgtaggatggaccataacttgagccttagcggcactatagttacatagcccccattccatagtcagagataaagatgcaaagactatccatttgacgcctgaagctccctaacaagaaaatggctgtacatgatagtcgcgagaatcaagaaggtaggacatatatgcagcgaaaggggcaatggaaagaaaacaagaaacaaaaagtattaggccaacaattccgctagtccacatccacagtagtcaatcaccgccgagctttctcgtcctcaatctggctgcggagatccgaaaggacatcatgccgttgggccatatgtttcttcagcccttccacctgttccccaacagccttgacatcctcccggagtcgctccaaatcctgaccatccttagcacggccagtgccctcacgcaactcgcgcaactcccgctccttatactccaaaagcgagagtgcctccttcttaatcaaaacccagttgggccggccatcgttgcgcggcccatcccgcctagattcggaggctttattggcggattctagcttcttctccaattccgcaagctcgcggcgcagccgcaccttctcccactcctcgtcctggatcgtgtcgctgaaatccgttcccttgggctgatacgagcccttgccaccaacgcctagacggccgaggtaggtatcgccgaacttggccttgcggcctgaccgtgtttcggtgtcaccgtctacgccgtaacgctgtgcgggtcgcgccttatcaacttggtagtcaatctggttgtgctcgaatgaggcacgcagcgaggcggggatggtgcgtgggatgcggaaaccctcgtggcggaagttcaatatgtgcaggaaggcgagcgtcgcatctttatttatcgcgggtgatgcggaggggttgaccaggttccaggcggagcggacgtccgtgtcggggacgtcgagcgattcgtagagcggttgtaattgttggactggggtctgtcagcggggtatttttctgggcgcgcacagcgcgctgtaagggctactcacattctatttggccgcgcgcgttccggttggcgtcgtagatctcggcatacttgttcttgtcgtcgggcttcatataccaatcaaagccgtcctttaggccgagcgagtcgtcctcgtcttctatccgctcgaactgctcctgtccgctgcttagtgcgcgggtcgcatggacgagatgtgctttggactctggaactagccaatctggcaggacatttgggacatcttgtagttcctgtttgcagataagacttgtgttagagcgatccgataattattcaggaggatggatcacttacaccattcactaagtcgaagactaagcgcattgcaacacagaactcctcgaaatctagctctccgtctccgtcgacatcggcaatgtcccagaccttctcgagttgatcatcgcgcagccggctgttcctcagcacggaggcggcctgggagctgttgaggtgtttttgaccatttgataatgaggcgaagatctcccaatatcgctcaatctcccattgctcaatctttttagtagccatgatgtatggagctccgataaacgtggtagaggatgaggtgggaacaatggggggagagactcggatttacctacttccgtcaggggctctgaggtcattgggctcacaatgtatttatccttctctgtagtatttatattgaaatgtttatcatagttttcacatggatatctattagaatctatctgttccttgcattatggtacatgatttcctgtgttgagtaggagaactcgttatcctgtcctcacgtagcgattaaatcttcggcgtcatgaatccttcttctcgtctttgttctcttgtttagtcttctctgcagcctcgagtcgctcaccgacttgaataatcgctcgttcagcttccaaaacaagctccggcgcttccaggatcgtagccaacttcttggcatcagacatcttcaacaggacccgatcctcgctctgctctatgtcgtcggcaacctcggaatatgatggctcggtcgcggaaccttccagtactccagatacgcgtttggcatatagctgttctagccccggtaatgagatagggttgaggatattctgtccgacgagtaattccaggtgttttgaaccattcaatgctgtattctcgtcagttttatgagccatcgcaatgtggacgatcaaaactaaccgcgccagtgggaccagccccgatatgccaagtagaaaaagggaatattcggaaccctgctctttattagtataccatatcaccggagaaggctcatgtctttcacatacactggtatcaatccaagtggggcggtaatcggcgcagctattaagcaccacatcatcttcttccgatgaagctcctgtctctccgtggcgaccgtgcgcagtacatcttgaactcgctccaatcgcaccgcgttaccagggaacagcacatccaccttagtcttcccatgatccccattcactcgctgttgggtcttgaatgaaggaatgcttttgagggcccattcttcgtatggtatccgttgctggactcgattgccccagcgaacaaggtgcatcttccatcctttgtcggcttcctcccacttggcccatatttcagccgccttggttgtgatcctatcaaggaccgacagctccttcgctaagtccttgctaaggggccgagcatatacgagaactcgctttgtggagatcggaattaggaacaggcgcatggtggtggatgcctaggaaaattggcaattggcactcaacaatcgagaatcgcttgatcgcgggcaagataattgataggtatccaatagttattaagagatactgtggacgacttcgaaattaaacgttcattgaaacttgatcctgtttttcgtgtgggtgaaaaagggatgcgggagtaagcaggcctggaggtccacgcgcataaatccagacgtcatccgaggtccgcgtacactttggtttcggtccctgaacactttaacttcatacttgaacaagaaacaattggggattcgcgggcaaactattgattgaagtttcccgcgactcccgggtttcagctttcaatttctgtcctgtattatgcacagctccaaagacagccctccagggcggatcattggtgacaagctgacagagaagtgttcgcccattccagaggcgcccctgacatcccagcttagcattgagactgagcccactgttcacaataaagcttccgatctatcacttgcgcatacagatggccagggccagacagcggaagagatcgcatactcccaacgcttcgccttgcgatctttacctggtatggttccatttaaagctcaattcgacgatcactcactaatagcgagtctttatagcctggattcgctcggtcgacgaacccgaggaggacggagataaagctacggcaaacgatagcttactcccttcccaaccaaatgacgcgtgtgtcgctcagcacaaccattcgccctactcgtcctcgaagccgaaacctaaccacacgaccaacaatggcctcttcgtggaggactctccaatggtcaaccgtgaatcacgctgggtgacattctcacgagcgatccaatacccccgaccgcccggtagagaggaacagcatgtcacgtcagaatggctgaatgagaatcatggtgattactcgcaaccatggcgaggaaagcatttggagggcgatagtccggagtacccgctgcacagcggagggcgaagggagatttggatcacgcgtttcagaaacacgcttctgcgaagtccgatcgtaccgttgattcttcgaatgactgtctggtgcttctcactctctgcactggccctgggtggatcaattcagcaaatggctaatcaagggacacaccctcaaggcccatctgcattgatggcaattatcgtcgatgcagtcgccatggtttacctcctatacatcaccttcgatgaatacacgtcaaagcccttgggtttgcgttctccttctgctaaagcccgtctcctccttctggatatcttctttatcgtcttcgattccgccaatcttagtttggcatttgcttcactttctgaggtgacaggatcctgcaccgaagcggaggtcaaccaaacaatcgatcctcgaaatgatgggatatgtacgcgacaaaaggcacttgcttccgtattgctggtcgcgctcttggcttggcttatgacgttctccattagtgttctcaggtaagcccccctgtctataattggcatactcagtccattttctaacgctctgataggcttgtcgagagagtaacacagtgatttttgagccttgttgtgtttcatgaatcttttagctgttgattacatataccatttaagcgatacttgatattgcgcaggcgcaattttagacgtgcatggcagggccgtcaccaccatacaatggatcttgacggaaccacgccacatccttgattctccgcaactttgcttcctcttctggcctcccataacacatatcccactgttttccgagtggatatgcgcccaccatttggaactcttcctgattccagtgcaggtcctctaaaagtcgatgacccacgcccgcaggcacaatgataaaatcaccgcgctgtaccgttggctcaaatcgtccggggttctttccgcctccaaaacacagacgtgctctccctgaaacgaccccgagcacctctggcgttgtggagtgaaagtgggtttgggtgtacatgctaaacacccactgaggaacaacctcgcctactgcctccaggtgatcttcgagctctgtagctgtggcattgaaggccccatggtatatcatgagcggcttggattggatcgaagtgttcggtatacgttgccactcggggatttggcgagtggtcacttgaatgtctgactgtggagttatggccattgcgagtgattgtttttgctttgctcattctgcattggagaaatgtttggaggagttatgttgtaggttgggcggtaatacctcggcgcgcaggtatgacgtcatccttggtgggctgtcaataaagtacatagaacctcaggtatgtaggttaatgaccatacattctcctggctatatatgattggcactttttactactttcgtatttcgtacatactaatcatggcaatccggtgtggtgggctggctgcaccgatagcaaaattccatttgcaatcatactgattggtatcttatactctctataaagtaacttcatacaaaaggttagcgcagtatcgacttttcttccagaaatagttattcggggccgtgtttgtcaggttctgttgtatataattaaggcctgaaatcagtttcaccaatttatatgacgctattgtaaatgattttcattctaaacaagaatttcgctctcttttgcttagccgggcccttctgtgtccgagatgacttttcatccagtcgaatcctgcagcatgcttgacgaaaagaagatcttgagttggatatttctactccgtagatgttcaagtcactctaaaatacatatctttcttcaagcatgataattcttactagggttgatactagttgaatatatcttcatatttttctcctaactagtttgggagttaagatcgatgttatgattatgtaccttttgtatgaagttactatataaaagatacctaatttgcagccgtaggtgttagcttggcacgattgtctcaagatatgcgaatgtcgtcatttatttgtacactacaaagtacacacgtagactagacctgatcagggaacttgaaggttatagtcatgtattcccatctgtttctaagattctaagacagcagggtgcttcttttacagcctagctttgctatatgtctagaagagtttgaagtccgtactagtactgggtataaatatagatctatggatcaagtctcactagagatatgtgtcgtgatacagatatagagacaggtttattatagagaaaccaaagccccaatacatgtatatcaccacatgctaaagtatcgtctgataaagaaataataatctatatacttagagcatctagattcgctttgatcaaaagcatcaaagccgatgatgtagatttagcgggaaagctccgccacctcaccgcctgcggcaacaaggccatcatccccacgctggtcctactcagcctcatcatttctctgctcctgttctgccttatctcttttccaatctttgctctagacgttcccgaggatatcgtcttactcttttccctcgactgtctggaccccactcttgcaacaacccctcctcccaagcgtctaccctcattcgatcactcgaagatcctttgaggcgtgacttgtggcgctacaaccgtcttgaggtaatattcatgacgtgtaacctactggttactatcgagagttaagagcgcgttgctgacttagcggagtaggactctcggcctggaccactcaccttcttccgcatcccacctcccctgcaaccgcgatgtctcccgcgatgccgccggtacctcacaaggatgaccttgattcaacgtgagcagacaatgaattgggattttgcttcaatgcgatggtatggcatgagctaactgggttagttggacattcctagaagcaggaatcgagagcgtcatgctcaaccttgacgccggaatcgatatgaagaccgtaagtgaaatgccgaacgatccctgtcgatgagggtgtttaaaaaatagaagcttactggctgtttttgtctagtacatggctctgtacacgtgtgttcaagattcaacaccacttctctgacgagaaccacactcacacattgatattagggctgtccataacttctgcacatcccaaaaagcagtcgctagtggccaaggcctacaaggatcacgtgggggttcgtttttccccctgtatgccagttctcgatatgagctgacctggacccaagcccatctgctcggcgaggaactttacaaattactcggcgaatacctctcgtcccatctgaataaggtctacaaacaatcacagagccacaccgaggaaggccttcttggcttctacattcgcgaatggtaccgctatacgaccgccgccaagtacgtgaaccacattttccgctacctcaatcggcactgggtcaagcgtgagatcgacgagggcaagaaaaatgtctatgatgtttacactctgcatttggttaaatggaaaacggaatttttcgaaaaagtccatgagaaggtcatggacgctgttctgaatttgatcgagaagcaacggaatggcgaaaccatcgaacagtcccagatcaaagctattgtggactccttcgtgtcactgggtctggatgagaacgatagctctaagtcaacactagatgtctatcggcagtacttccagcagccgttcatccgtgccaccagaagctattatgaaaatgagtcacggcagttcgtggccgaaaatagtgtggtggaatacatgaagaaggcagaagctcgtctggaagaggagaagctccgggtcggtctgtatttgcatccagatgtcaccaagagcttgaccgatacctgcctgtctgttctcgtcactgcccactcaactttgcttcgcgacgagttccaagtcttgctggataacgaacgtcaggacgatcttgctcgtatgtatcgactcttatcaaggatcaaggaaggcttggatcctctgcgcgcgacctttgagaaccacgtgagacgggctggtttggctgctgtcgagaaggttgcttcggagggcgaaacactcgagcccaagttgtatgtcgatgccctactgcaagttcacacaaggtaccagaacttggtcgacgaggcctttaatggcgaggccgagttcgtgcgttcccttgataacgcctgccgagagttcgtcaaccgaaaccgcgtctgcaagacgagctcttctaagtctcccgaactgctggcaaaatatacggactcactgctcaagaaaggatccaagtcggctgaagagtcggagcttgaggagatgctggtgcaaatcatgacagtcttcaagtacatcgaagacaaagacgttttccagaagttctattccaagaacctcgccaaacgtctagtccatgtgagctctgtttctgacgatgctgaaacaagcatgatcagcaaactgaaggaggcgtgtggtttcgaatataccaacaagctgcaacgcatgttccaggacatgcagatttccaaggatcttaataacaactacaaggtctggcaggacaaagtactagaggatgaagaccgaaagaaaatgtgcgatgcccacttccaaatcctgggaactggcttctggcccctcaatgccccgaccaccccattccttgcgccaccggagatagtcaagaccgccgaacggttccagacattttactttgacaagcacaacggccgcaagttgacatggctgtggcagctatgcaagggcgaaatcaaagctaactacatcaaaaacgccaaggtgccctacactttccaggtgtcgacctatcagatgggcattcttcttctcttcaatgaaaccgacactctgtcctacggtgagatcgaaaaggctactaccctagctaccgaaatcctcgatcccaaccttagcatcctgctcaaggccaaagtcctcatcgccagccccgagggcgctaagcccgagccctccacttcgtttacactgaactacaacttcaagagtaagaaggtcaaggtcaacctgaacattcagatcaagtctgaggcaaaggttgaggccgacgacacacacaaaacgatagaagaggacaggaagcttctgcttcaagtatgtctcctacctaatcatcactccccacacagtctatttgtcctaaccttgctatagtctgccattgttcgaatcatgaagtcacgcaagaagatgaagcatgtacagcttgttcaggaggttatccagcaggtcaaatcccgcttcccgcctaaaattcccgacatcaagaagaacattgaagcccttatggagaaggattacattgagcgcatggacggcgatgaaatctcgtacattgcttaaatcgaattaaattccccttcccccttccccttcccgcccacttcctccaatattgcacaattaactcgtttctatttcctttttctgttgctctctgcttttgctactgtctctttccgacaccagtggcttcctgtgtccctttacccttctataccatcgatgatgaaatagcaccgcaaagggtatgggacctctgctggtccaggatagaactcctacaatggatagctagcggatagaatcaggctgataggagcatgaattcttctcattgtatcggcgacttatcttatgtttcttcatagcgctgagacgacaaacaaatgatgacctgattattttccttgcttttttgctcttcgctcttcgctcttcactctctgtttcttctcttttctgaaaataaaaaaataacaaaatacaataaattcatgattatgttctgcatagccggctattaggtattcgaagattaaaacaacgctgatcaatattgaacatcgtagaaacgttcacttcaatatttcattcagcggatcaatatgcgtagtattggctagacccagtgcgtccttatgtatagtcaagacaagaactgtgctagaatggatatgctatgcaaagtagagacgacaagagagacagagaacagaagaccgaaagtccatgaagtgctgaatcaccctagatgcgaaaaacgcaaatcaattccaggtcccaagtccagcgcactagttcgtaccagacgagtctttgctctggaccggatgcgcctcctctttgacagggagccctgtcgccaagtcctcaagcggtgtatctacctcctcgccgctcgggggggtgggctccttctggatctggggaacagtctcctcggtcttgagactcaaccctaggccttcattcgacgtgagagccacaggggcgaacccgtctgcatcaacggtatcctttccatcttgcttaaggttctcggtctgcttgtgcggatcataagccgggaacccctgtgacaggggagacttggggaagggagtttcgatagaatcggacgtggggacgtcttcgtagcgctggaactcgccgctatcgcgtctgagtatgatattactccacctctttctccgactggtgctgcggctcagaccctccttggggctctcgttgccttcgctattacgcaggatggagcggcggcggccgcggtccatctcggctgtttgggtaacgatggacaagatcggggtggatgccgaggtcaattcggcattgggagaggtacttgggctcggggatgtcacgcgcttttcttgccattcgcgccgcttttcgctcgcccaggtgccccacgagctaagatacgagccggctttttggctagctacgctcacggaggcctgagcctgtgtcaggtcgacggatgcccttgggcggtttgcgaaccaggaggcatcggagggattcggtgaagtgggtattagtgatattggggtttctttgtcgatggaggtgcgctgcgattgggaggcggctctctcttcggtgcgtttgcgttgcgcttcgcgcatagtctcgagatcggaccagaagctggtaaatgccgcgctcacttttttttgtccggttgagaagtggcggttcagagcctcgcgaccttcccggacacgctcatcaaggtggaggtctgctacctgttgtgcgagtcgtctttggacatcttccattgtcagaccgccggcgcttgggtgtcgtggctcagtgatggaaaataggagcgcatccgaagtgagacgtgagaacagggcgtaattatatgtggtcttccactgggtaaggaactctgtattgaagtcggtggcagggtctccttcaatgttgaggttttgcagctgggttctgctgcgagccgccgattctccaacgtcggatgggtagagctcctcgtggtacttcatggacgataataatgctaacaagtattcttcgaactgtagtcgaatgaattcttctgagcccataaagccaagggtattgggttgtgaaggatgttcctcgtcccaagtgtcattgacaatttgtgtgagcaggtcaatccagcgcctatcggccgctgagagaactagggcattgcggagggaaggagaatttatgacgatactgtcttcgtcaaggttaattagaatatcactgtaccggtccttttgctggagaagtagcgagtttgttgagccaaccacataagattttgtgccatcatctgccagcagatccagcagctggaggggtgtataggggccaaacatgcttccctttccgaaaatctgcaatgggagccccatgtatgccaacaaagaacttctgtcactcgtcttgagagatgttggtttctcaacagtctgagagtaggtgtcaaaagcaggatctgcgcagtcctgcaagctgttgatgaggccgggtattaaagaaataagcgaaaactgaatcatgcataggcgttcacagcgcgtcccgaagaaaagcatcttgggctgcaacagtagtgctttaaaaagaaccaaagtctgaaatttgaattcgtgaatcatctcccgtagcgagaggccttcataaattagcgaagcttcacacatatcggagaggatgatatccttacccaagttctgatctttggggccatcattcaacagagaaatcaccaagccctcgcggaatttctgtatccatgtcagcatttcattctatacattgccgcaactagtacataccttcaagatatcaatatccgagaagtcactgtttataacagtgccgaattagccagattccccattcaagccaggttctattccacttccatgccagcgcatcagggaagcaaatagcccaccgggacaagtatattccacataccgttgcgcgaaccaagccgaagtcaccacggagagcttctcgcgcaaatgacctactcgctgcggagtatctgtcacgaccacgacggccttttgtaccgttgaccgagtcacatcgggcgacgggttgataagcagactcgaatcaatctggcgggagcaggcgatgccgaacagggaggtttcaggcgcagtggatgtggcctttcggcagagtgtgaaatatgagaattcctcggtcgatctgcgatccgacgagttagtgggtttggcgcaaatcggcgctccttgtcgcgggattgcgccagaggagacaaagaagggaggaaacgagatgcgtgtcggggacaggggtatcgtacagatgtgctccgtcggatagggccatgaatgggagcagagaccagtcattctcggttgctgggtcggttccttcttcggcaatgcaatgctcaatttcagggccgctgtaggtgtttgtctcagtcagccaggttccattatgtccgtcttcgtattcttttcaacgatacgagttcggctctcgagtgtctcgtggctcaccgtgcatggtggaaatctatgactaagacaattgtgtcttgtttatgatggacagccatcgcgccgaacctcgaacggattcggtgcggctttgagaaatgcaattagaatgccgagaatacgcagttcaaatgaatggtttgcaacatgtagaaagtagctgcttctcctccaaaacctcgacgtaggtttcgtttcgcatgagactgagatcgtcgcaaacaggggaacatcgctgatacggttatcgcacggggagcgggcggtgagggtagccccgccaatatgcaacacaggtaggctaattggggaaaagtgatatactactagtagtaggtaactactccgtggtgttgaggaaataacttagattgcgtagatatttcaaaggattataggttatgaggtgctccatcgctgaactgaatcagattccccgtatgatttctcttaatcaccaaccaattcttgacgacgccggaagagttatggacaaggatttccagaaataaaaaaagaacaaaatagaaaatgaaaaataaaataaaaaacacagtgaatacgccagcttcgtagcacccttgaacagaaatagagccagacttcaacttttgaaactggaattcaatggcagaagagcgtttcttgggggagggggggggaaggtctcacgtcaaaaacattatgcgaatgcctgtccagtagcgttgccctgtactgcgccctgtaccaaggcttggccagcctcgttgccttgttcaatgttgtggaagtcgaggatttccgagtacctagggtggaaaattagtaaaaaaatcgtggccggtaacatattcggaacgtacatcatgatcttccaagtatctaccggcaaatcggcatcattgaacgaccaatcgaacttctcttgtgcgacaggttcgtcggtggggtcatggtagggcgccaggtactcatgcgctaatgcttctgtggcttgaatgcgctgcttcgggttgaaaaccagcatccgctcgagcaggtcaaccgctaaaaaaacaagttagcgcattgttcacaactctatggtgcaaactatgacgtaccatcggcatcggcgttcttgaatttatttgcgagtggttggcgctcgcgctttggtagtgacttgacaaatcggagggtctagaccatatattagcatgttctcgtctttctaaacaaagcataactcacattctcgctgcagatagtctggatcacgtcctcgggaggagtaccgagcagctccgtaatgatcgagaactggttgacatggtcctttccggggaacagcggctttccttccaacatctcggcgaagatgcagcccgcgctccagatgtctacctcgacgtcgtacttttgccaggtgagcatgatctcgggcgcgcggtagtatcgtgttgagacatagccggtcatttgcgggtcctgaatgcgagcaagaccaaagtcgcagattttcagatcacagttctcgttaatcaggatgttgctgggtttgagatcccggtggaccacaccggcggagtgaacatatttcaagccacgctataagaacgttagattccggtgccccgggtattattcccgtggaagtcttaccagaatttggtataagaagtactgaatgaattgcttttcaagagggcgcgaagtgagaagtcggtggaggtcagttcccagaagttcggtgacgaagtagctgtagtcgttagtttatactgttcaccccgctttgtaggtaagggggacatacatgtcttccaaaggcgaaatgaaaatgtcactcaagctgataatctgtgggatgtcagcaagtaagactagtccatttatttgacggagtacggacgttctcgtggcgaagatgtttgagcagcttcagctcgcggtaggttcgcttggacagaacgggggtactgaacggcttcatgattttcttgactgcgactggctgtgcggtcaattggtctttggccgaactgtggtattagtggccttgttagtatatacttggtcttggaaatatcttgtgcgacatataatgcaacataccagaccagtccgaaggcacccattcccaccggctgtagttccgtatacctagaatcagttagcaccaacatcctctcaaggcgcttatgaagcaccccaagtagataccaaggaacagggcattgcgaaccggctggtgatctcaaaggtggtgccaaaaatctgggcacgcacgaattccgccatgatggaaggtgggggtatgcaagcggtaaacgagaaagagagatattcctatcagaattccacgtcaaacaagacgaaggagagtgaagatggtagctttccagagaaaattgccagaagaaaggggtcgcgaagaaagcaagtgtgttggcaacaggtgtggggaagggactgggtgaaaagcgcagaaaacaaggccgatgacgttggcgaagtccggttatgtggatgactcagcagcttctagcccgtgtattaaagtgggttctctgaatattatatgcaggttggcacggtggttgtatttctatgttaaaatctctgtggaggtgttgttccttgcaactatacaattctcatcctatctcatgtccaggtgttggttatgcgaacttccaaagttggcaggtaaccctcgctccaccacgcggcccagaccctggtcttatcccggaagatgtttcccttgaacaggattgctcgttgatatcgttgatatagactgtagaacttgtatagacagatcaatgcggtaaattttatctatgtatatctatatatttttttaattctgcgcttaactcgctcgagaaccatatacggagagctcttgggcctctattgagaaccttggcaggtcagagtacaacccctcaccttcaacccccttaagcagacatggtagatatcggaatttaccaaatctacatgtatataagctctaccatagcttcctctctggtgcttctataggtctggtagactgtcccggaagacattgctgtaaaagaggtccgttccccaagcctagagcacatccctccggctatcaaagcacaattgactgtcccaataggccagctccaatattctctgacgtgtcttcttagcttacaacaatgcaactcctggatgcaatttggcggctgggacatgtgaaacaatgtctgccacgctactgcggacaactagtacatgcaacaaaggcctttgaatgaggtgcttgactggacaggaatgcagcttattttaaactctggagatatatctccggggatgtattccctaagtgtacctgatagacatgtgcacattcgcatacaaacatatattcatgggagatatatatatagtgactctccgtggagcctgacgattacctctctacctcacactgcctaggtattaataataccaatgtcaatgtgctcttcctagccttgatcttgccagtgcgccctgtacatccgtctacaagcctgaatctacttccttgtcgtgaggggagagggtcagtgcccggcttcaccgcatatccaagagaagtcagtggtcccaggatgaaagcagcacgcaggtcatgcaaatcaacagaaccatagcatttataagtatacaattctacaatcctatataatggagactatccagctgtccggagtactccgcgtcccaacccaaccccgccttgcctgaggcagtgccccaattttgccggtactctccactttaaagctccagagtgggttaaaagagtatggaacggaatacttggtacggtacggagtacagaactcctaatcagagatttggattggagattcgaggtaaatagaatctatataagatgatcgaacttccgatcgaagatacatgataagaacatatgatcgcacagcctgggtcatctggtggcgccccgttcaattagagcccccggggctgttttctgtcgcttaaacagtcttgttgataggagttctagtattacgatctgtgattgggatggttattgcccggcctaaaatgaatgagatctgacagcagaacgtgcccgtttcccccgggtttttccttacaccgacctgggacatagctatatatggaccagacaaaagaagaaaatgaacagatctaacaagaagcccaaagatgcagttggatataggtaattgcatatcagatacaagatacaagacctataaccacaaagaaaaagaaattaaaaacaggattaattacattaattaccaaatgtaagctgagccgtacctgtttcttacatatcttacactccctctccactcccccagcatgacgatggtcgcactgactctacctctgattcttttaggactcaggacacttttctaccctgactctactctcacatttatcactctctaagctcagtctctaatttgaggtcatccctgcctctccgcgtttacacatattccgcctcccccgtcctaaccgctagacccgaactcaacaactctccttctaaacccgcttgtcgcaactccttcgacctcagcctttccccttgacaccttctcaacctaggtcctcttgaaattggctctgatctcacgtatccctatttccacacctggtcgcgctgatcctttcccgtgcgtggcgcttggcagtcttacaagcgaaggctccggccgtcttgaccggcacattttgttcctgcgcgtggtggatgagtcttctccctgctggtctgggttactgacgatttcgcaatggggtcgtgtttcagctcggagtccgcgggggacgcggaacagaagaagcgaagtcaacagatcgaccgcaagctagaagaagattctaggcggctacgaagagaatgcaagattcttcttctgggtaggcattcgggtgttcgcttggaggagagctgatggttgactttaaactcgcgcaggatctggagaaagcggcaaatcaacgatcgtaaaacagatgaagatcatccaccaaaatggttacaccgtcgaagaacttgcgctgtaccgattgaccgtgtacaaaaatctgctggattgcgcaaaagcccttatcggagcataccactatctcaaactcgaaccgtccagccagaaggtgcaggattacattacatttctggaagagtacaacgtggacccggatcccaacactccgctcgattcgaaaatcggcgacgcgattacatatctctggaatgacccgtgtacatccacggttttggaacatcagaatgagttttatctgatggactcggcaccatagtaagtccacctatcgttatttccgatcgcaaggccgagttctaacctgtggtcagtttcttcgacgaagcgaaacgaataacggcccccgattacgtcccggatgtttcagatgtgctccgggctcggacgaagaccaccggtatatatgagacacgcttcacaatgggccaattgagcatacagtacgtgggaacagtcttgaacacgatttggaatagctctaaccagccacagcatgtttgatgtgggcggccagcgcagtgagcgaaagaagtggatccattgcttcgaaaacgtgacgtcgattatcttttgcgttgcgcttagtgaatatgatcaagtactactggaagaaagcaatcaggtatgaggctccacaccgaacgtactataccggagctgacagacttgcagaaccgtatgatggaaagtttggttctcttcgactccgtggtcaactctcgatggttcatgcggacaagtatcatccttttcctgaacaaagttgatttgttccgcttgaagctgccgcgatcaccgttgagcaattacttccccgattactcgggcggcaacgacgtgcaccgtgccgccaagtatttgctctggcgattcaaccaggtgaaccgagcgcacttgaacctatacccacagtgagttcacttgatcctacattgccagtttccacgcaccgtgatttttgacagctttctcttctcttagcctcacccaagcgactgatacctcgaatattcgtttggtcttcgcggcagtcaaagagactatcctacagaatgccttgaaagactcgggcattctatagccgttgaatatacaccgaaaacccagtcacacaagtgccctcataccgagtcatacgtatgcgcactttccctctcaactaaacttacgaccaatcaccgtcccttttctcaacgtcgctctcggtgtccctactaccctcttcaggagactgcctgaacagtttttaccatacccctttcgtcttcttttgcttcttttgctttttttctttttttcttttgaccagctgcaggtgttgatggcgcctttatggctttctcagctgacttcccaggcgctagttctggcctggggatatcccattttggtacttaatctggtttcctctatcaaatatgggtttatgttccataaaggtctcagtagcatgtttggaccgtcaaccaagctactgtttctgttccatgtgccctttccttcttgataagtcccggactgagcgtatgacaaccaacccagaaatgccaccgggcaagaacccggtagcgggactgaatactttccggactttcttcgtgtgctcgatattcctcacgaacccatcaccaatgggatttttttttccttgtctcccttgtcttcactgttgtatcttttctttgccttgtctcgaggcctgtttccagcccctcatgcataccagggctgttttcctattttcgacattgccatgtcctgctgatattactctattcctctaattcctcttctccgttttcctttatctgcgatctcttactcttctcctattacagctccctattgacctgggattcgattccaagcgcttccacgtctgatgctttttgttcgcttttgcttttgttctttattgctagcttgttcagcgttcttgtttcaacctcccgagaactcttacctatcttgcatggaccgatatcgggattgctgagcatttgccctatgccagatcgcggtcccccccggagccctggtcaggtggaacggagctgggattgggacgtgacacgggcttattatgtatagtgagcttcgagaatcaattctcctattcgagtgtgttgtccatactgtccctagatgtgcttagcatagatatcttttgggagtgaggacaggagtgatataaaaagtagaggaaccctctttataaagaactaagctatggaggaaatatattcttggcaaacctacaacgtccaaaccccgccccgacccatctcaccgccccaccactagagatttccccgatagatatcacaaggccccgcggactagaaccctcggaagcatacggccctatcgccgtgtaatgaatccaatgaatctaatgcatctggctaccccaggttcacgatcgagtcctggtactccagtagggctacaagcacggtacatacccgcttcatgcaatgcgtctgtgcgctggcatttgcggggtaggtttgcagtctaatgcgcccaagctggcatctaatcaccaaatcgtggcaaaacggagaagtcggcatgggctggatggttggtacggaagagctcgatagtttcgggcgatagatagctgatgtggagccgatgaagcccggaggagctgggcttctaggccctccaggccctgcggatttatattggccgttggagcatttccgggtcttttatgcgagcgccgatggacgtggcctgatgttgtctcgggcataaaaagtcacatgtacataactgcgacttggataatccgtcatgacgtacttctctctgcggtagcacgccagaaacaggcttcacgggacactactggccaaaaataactatggcgaggactggaatcagttagaggagtatccgaatattatttgaatattaatttgcatattaattcagaggcaacacccgaaaaaaaaagaaaatgtcggccggtgtcactccaaaagtcatgactacatcccctccccctcttttctttttaaagtagcttcctcttcaatcctcttttctttttcctgtactggactttctccagcttacagctctcccaccttcacctctttctctttccatcatgtcgacgaccaccccagatgcagctgcagctgcaccggcccaagcccaatcgaccctacctcgtcgggagcggagatcttcttccgtaggagctcccattgccgacctccagggtcctgtcggtccgggattcagtcgtcccaagcacaagcgcacattcactggccttgggcctgccgagattaagcatgtggaagctagcattcctgagccattaagagaggcgtgagtaccttccgcgagcacttgcttatagttgaactaaccaattctcgcagatggaggaaattcgtatgtggagaaaatcagggtatcgggatgcggggttccaagctaatacttggagtcaatttagtcgcctgctgaattcaccactaaagaagagttcgaggtaagtcccactggctttcgtacttgataccccagatctaacgcctcgcagacagatctcgtgcgccatatcgaaaccaccctcgctcgctcgctgtataattgcgatgagttgtatgtgttctgtgcacctcattcaagccgttcttgctgactggctttccatagggctgcgtactccggaaccgcgcttgcgtttagagaccggttgatcatcgagtggaacaagactcagcagcgtcagactttcaccgatcagaagcgaatctattgtatgtctccagcccggtgacagaagacaatggctaatccctgtagatttgtcgcttgagttcctcatgggacgtacattggacaatgccatgctgaatgttggcttgaaggatgtggctcgaggtaagcgctcagacaattgtgacctggaacgtcgctgatggtagcagagggattgagcgatctcggattccgcgtcgaggacgtcatcgaccaggagcacgatgcggcattgggcaacggtggtctaggacgcctggccgcgtgctttatggacagtatggcgaccctgaactaccccgcctggggatacggcttgcgttaccgctatggtatcttcaagcaggagattgtcgatggctaccaggttgaggttccagactactggctggatcacaatccttgggagttcccccgacacgaaatcacagtcgacatccagttctatggtaacgttaaaaagtaccaggatgaaaacggcaaaatcgtccactcgtgggaggatggtgaggttgttgaagccgtcgcatatgatgtccccattcccgggtatggcacgaagaccaccaacaaccttcgtctctggtctagcaaagccagtagcggagagtttgacttccagaagttcaatgctggagagtatgaaagcgcagtggcggaccagcagagggcggaaacaatctcagcggttctctacccaaatgataacctcgagcaaggaaaggagctgcgtctgaagcagcagtacttctggtgtgctgcctcgctgtttgatatcattcggcggttcaagaagacaaaacgcgcgtggggcgaatttcctgatcaggtcgccattcagcttaacgacacccacccttctcttgcaattgttgagttgcagcgcatcttgattgacaaggagggcttggagtgggatgaggcgtggggtatcgtgaccaagaccttcgggtatactaatcacactgtccttcctgaagcgttggagaaatggtctgtcccgttgatgcagaacctgcttccgcgtcacttgcaaattatttacgacattaatatgttcttcttgcaatctgtcgagaagcgattccccaaggatcgagatctcctgtcgcgcgtgtcgatcattgaagaatcgcaccccaagatggtgcgcatggcctacctggctatcattggctctcacaaggtcaacggtgtggccgagctgcactcaaaactgctcaagagcactctcttcaaagactttgtgacggtctgtggaccagaccgcttcactaatgtcaccaatggtatcaccccgagacgttggcttcaccaggccaaccccaggttgtctgcgttgattgcagagaagcttggaagctatgacttcctcacggacctcacaaagctagacaagctcgaggcctttatcaaagacaagcccttccgcaacgagtgggcggtcatcaagcgtgagaataagctgcgcctagctaaacatatcaaggccactacgggcttcgatgtcaaccccgatgccctctttgacgtgcaggtgaagcgtatccatgagtacaagcgccagcagctcaacatcttcggagtcatccaccgctacttgactatcaaggccatgtcagccgaagagaagaagaaggtggtgcctcgggtttccgtcttcggaggcaaggcagcccccggttattggatggcgaagactattatccatctcatcaacaaggtggccgatgtagtgaacaacgacccggaggttggcgatcttttgaaggttgtcttcatcgcggattacaacgtcagcaaggcggagattatctgccctgcttcggatatcagcgagcacatctccactgccggtaccgaaggcagcggcacgagcaacatgaagttcgtcctgaacggcggtctgatcattggaacctgcgatggagctaacgtaagtcttcttcacatatccaccttccattctgtactaacccaactcacagatcgaaatcacccgtgaaatcggcgaggagaacatcttcctcttcggcaatctcgccgaagacgtcgaggatttgcgtcaccgccacttctacggcgacttcaagctggaccctaatctggagcgtgtcttcgagacaatcagagacgacgtgttcggcaacagctctgacttctctgcgctcattagctccatcgatgagcacggcgactactacctcgtctcggatgacttcaactcctacatcaccacgcacgcgatgatcgacaaggccttcttgaataaggatgagtggctgaccaagtccattctctctgtcgcgcgcatgggattcttctctatggatcgcgtcactaatgagtacgctgatggtatctggaatatcgagcctctggttgttaaggactaaacacactttttgacaaaggcagtgctaagtctttcttcttttggtttgtcgtctcattgattaatgaactctacggctttggttgttatccttagcattaatagtatatcaatcattcttataagttagttatagaagtcatctagacatggtattcaagccattgaatagaacactttatatgcaattgctaaagaactaggtatatatacatctctatctcgacatacagaatatattacctcgaggcagtaatgactgatatcgaaaacacccactccatgccaaaccaagaaatctaaacataacatgaaaccataaaatacgtcaaaacccccaaatcgacaccctcactcctgaatcgtcggctcagtctgcctaggctccgagaaataatccggccaaagcgccatcttctcgtcccgggaaggcgtagccgtagccataagcgtaggaacctaaatcaccaccattagcaaaaaactctttcaatctttcaatcttctcttcaagggaccaaaaaacatacagcctccttactagaaatccgcctccacatgttcgcacgcgggttataccgcaccggcttccccacaccacccgtcttcctctgatcctccaaactaatcgcctcaacctctttcttaacatccgcaaagctatcaaacggcgtataagtgatcccatgctcgagacagtactcctcgagtctgagcccgcggcgcgcgaatagcacatcagcttcgcgggccgcggcgagatccgacacgccgtcgccgatgaagacgatcagcgggatctcgtccggctcgcattcggcttgggctttggtgcgggcttggtttacgctctcggctttgtcgtggcctgaggctgtattgtcgcgccagacgggtttccaagggataccgcctggggcttggaggtcgtttgcgacgatttggattgaggaggcctttatgtgggaagatgtgttagtgggtttttgaatggacgatttattgattttttgattgatggcggggattggtttttgacattacctctttctcgccgaggaagatgtctagcgtgcgctgcagaacgggctttaggcctgcgctgatcacgttgaaggggaagccctcgcggacgcagtactggtggaattctcggaagccagagtcgagttcgaggttcttttccattatgtcgaagccgtcgccgaaggggatgctgagggatccccacatgtcgtctgagatgtcgcggaaggttcgctcgccggttttgaattgttcttcgagtttgttgcggtaggctgcgccgcagccgaggttgtctactaggacgtggccggtgtcttggaggaagattgtgccgtcgaagtctaggggtgttagttttggggtgttctgggacttagggcttgtggttgggattggagggtagggaagagtttggggtatatgaatgggctttgcataccggagaagatgatgatctttctcttttggttgtcattatttgcctgtgatatagccattttgatatagactttagaagggtttgttctatagatagatggggtatgtggagggagtggtttggaaagatacgaagtgcaaatttaaaagaaatgaaacagacctgccaaagtcacgatcctaagtacaattcctgtagaacctggcatttagccatagcaaacaaggtagacaagaagtatgacgtaaggagatctaacgacatcagtgtgggccgctgagggggctcatctgcacatcgtgagaagtcgaggtgttaatatggggtataacagccgctgattggctggtcgtcaagggtccgcataatatcagtggaagccgaccgagtctttgatcggattggtcaatgtcattgtggatgcatgatacatcatacatttgtcaagtaaaatggtgcaaattaaaaaaaaaaaaactaagccgttaactcggcaacccgacgttccagttccggtacagcccgtaactgcaagtccaactcttccttctcactgcgagattgttaataaccgctcggcggaaaggaagggcggaaacttactcttcgagtttcaaccgccgctcccagtcaagactggtgaagatgtagccgccctgtccatcgaactgcaggatcttctggtgatacttccagagactgcgtcggtgcgagacagtcatgagagtaatgccaagtttcttggccgtctcgtacataatcttctcaatctccagcgtcaccgaggatgtacactcgtccaaaatggcaaacttgggtcggtgatagaacaaccgagccatagcgatgcgctgctgcagaccaccggatagtacgtcgcgccattcttcctctgcatcccagcctcccggacggtctacgacggacgcgatatcaaccactgataggatctcgtagagatcggcgtcagtgacacccttagcgcgcatctcgcgcactccatctgggtagatcacttgctgtcgcagggtcccacgagacagatatggtcgctggggaatgtagaaaatatcatggaaagggggttttttcaccgtacctccgtatactggccagagcccgcccaggatccggaaaagagacgatttgccgcacccgttgggtccgacgatcaggaggtggtcgccggggttaacggtgaaggaaagcttacgcaccaatacgtcgccgttcggggatacgatcggtacatcgatgaactcaattgcgtcgctttctaaaactttaccccgaccagacagcacctccgcattctctgccgtcgaagcggaagataccaacttcttctcgaaccttccagcaaggaggtcgtccatcacttccaataatgaggagacacgcgaagtgtagccagccagctctgagatttctttgtaggagaacatcaatcggccaaaagcatctgaggaggaaagcaacattcggcgattggtgacgaagcctgggagtcatcagaatttaaaaatccaataccaaagggcaacaacttactttcagtgtgatctgccatgctgtgggtagtctgaccggggatcttgaagaagacaggcacactacatagcaccaagcccatagctccccagaaatacttgatcacaaagtcctccatgaatccgtggtaaagtcgccggcgcagaatgcggttcacatgtttgatcagcgtgaaataacccttgtccagggtatccttctcggcctcgtggccgtggtaaagcgccacttcttcattgtactcaataagccgtgaatggaggaaacggaactccccctccagccgagcctcatcggcaacatatttgccaaatggtggagtcagcatacgcatgacgttggcggacaactgcactagcagactcatgatgaacagcccttcacctcccacgttcttggagagcgagtagttgtaaatagccatatcgagaatgggcttagctaaattggaatacagttctgctagactgtctgagaagcgggacacatcgaccgtgacaagttggtcgggattcttgattcgatcgtccaaggcggagatggcatagaaagtcatattagacagatacttctcgtggatatagtccgtgagacgcttgcggtagctgagagcaagcttgcactgatggtaggcgagctaatacggcgaaacatcaagtcagcaaatgtactgaacggtcgcatctagcaccggaaaccggagacttaccatagaattcgtaaaagtagcagggatagccacaatcatccaccaaacaagaccgagcaagaaatccttccccttaccgcgcaccaagttgctcacaagtcttccgtccagctcggcgacgtacaaactaagtatcgtccgcagcaccaggaagacggtgtggcttaccagcagccgtagctccttgctccgccatccgggtataacgatcttcaataaacggagcaagttcttgaagaattcccggttgatccccacgcgcttcttgcggggttgttcctcatcacctagactactggtgccgggccgtcggagcagctctacctgctgtgacgcggctttctgctcggagatggcattgtggattcgtttggcgagcgcggcaaagagggcgaggtatacggcacgtgagatattggttcggtttcgcaggtagagggatgttaggctggagaggatctgtttgatggagcgttcgggcggtagtagtttggactgagcggccatggcggagctattggatgcttatcagccagattcgggcgcatacatgtccgctgttgagtgagttgagggggtcgaagggttaggagttgaggagaaagaggctattgccatgacggaggtgacatgtgataccccaggaaactgggggagattcagccgaggaatccactttcaggtaatctcactggtctaaggtagtcaacaccatcttacttgtaatatatactcgaacgcatttaatgagaaaaatatacatagagatggggaattcattaattagaaagagtgatacagccctgaaacaaccacatgtatatacatatatgtagtcatgcagaaacggtaatgacaatgacactgaagatgccaatgataacaagattccgcccttctctcgtgcccgaaacgtatatacaaaagaacggggtgagtagataatactcaaagacatgcgctagtatgtacaggtttgataaaacgcaagcttgcagaagaatacataagggcgaagatcataaatcgagatgatataaatcaaaataagaaaacctaagacgaggatttgctctctggttcattgcggcctgtcctgggttctacctgatccctcggacggataccgctgttgatttgggcggcgatctgggcctgcttgaagcgctcgaatgcttcggtgtcttgctgctgagcagcgtagagttcgtcgacggtggtcccaagatggttaaaggccacgtcggcatcaaagtcatcgaattcagagagagactgctcatcgtggagaatatcaagcttttgccggagagcggcaatatgcgaactatcgtcctcgtattcgaaaggctcgtcgtcctctccaggaacaagagacgggttgaggaagtcgcggcggaggttctggccgatacggtgaatgtgtccttcttgggaggtcatggcccgagagtggagggaagttacggagctggtgcgagaatggcgaacggcatattggtccgtgtcttcctcgtcgaagcaattttcctcaagctggctgctgttcagattaccgctagcaaagaaggaactgcttccatcatcatcaccggagtgttgagagatggtgtcgggtacagtaacagtgggcgggagctgaggaacaatacgagtctctgggtattcgtcctcaaagcgttggatcatcttatgcaaggtcacgtccaaaaattgcaggcggccataattcgcgtcattacccgcacgatcttcgcgaataagagccgactggatccggactctgatattgcgcgcggattccagcagatttttcgacatgtcgcgaggccgcttagtaggaacagctcgggacctgcggcgtcggggcgtcgtggtaccactgggcggtagagattgctcaccaagaagatccagaccttgctggtccagattcccgagacaaacacccaatgctttgacgacacccgtgccaccaataacataatcctcgtcgggagcggcgtcatcatcatcatcataaggctcttcggaaataaccgagtggccgacaatatgctgtagaatgtctggatatgggatatcctcaagcgacgaagtagagccaggaagctcgactgcaatggcgccgccttccagattccgcagcgagtaagccacaatctgtgatcctagagctttgacaacttcgttgttttctgcgctgggaacatcgatatcgactgcaataattgtccgtgaaacacggacagctgtcatcatagacgcatacacagcgcatgcttcttcctgagcaacggggtctgtagtggacgccaactccacaatctgctgattctcaagaatgttcagatgacacaagctggggcactccggcaatacctcggcaagaccaatgacatgatccggtgacaagttgacgtcagcgagatggaagcgcttcaaagacggcatcttcggcaggaagcgacggaaagcccccagcgcgctaggctgcgaggagaataactcgcgattgtgagagaaatcaatgaaccgaaggttgtggatttgcgcaagcgattggagcaatggggaaatcaccgacgggttgagcgagcaatccgccagactcagcgcataaagcggtgtttcaggttcgatcgcggctgtgagtagatcaagatcatcctttatagcgttgccacctagatccaatccttcgcactgtccagctttgaggtactcgatcacatgctccagaccctctcttgtcagaccattgttcgcaaagccaagtcttcgtagacccattttggtggttgcctggcagatctgctttacagcgtcgaccgaaggataacactcgctcaaaagcagttcttcaagatgatccccagcaaagcgctctgccagggcattcgcaaagaccattcgcacgtcggccgtaggctgggattggctggttgggccacgaacatcgaccgcaacttggcctcgagggaaaggaatacctgacaaatcaatagatttcagagatttcgataggtgcacaaaaaggctcatgtggcgccatccttcccgtccaattttcgggttgtctttcagagaaagcttttccacaacaccgtatcgttcctgctcagtggagtctgaagattccggtcttcgcaatcgtctccgtcgatagcgcatctgctctaccgtcttggtggcaagcagagctgaaaggatggctcgcacagaagtatctgtcaatgcacaattttcaagaatgagttcacgaactggaacgaccgcgagccaatcgctgaatgttgtcaaatcctgtgaggtcatcggaaaattgctcagatccaaagccgctaccgtgccaggtgactcggccagtgttgatgaaggcttggagatctcgtcaaccactctcttgagaacaggcgtctcacgtagctggcaacaacggcgatatatgcgcactggatcggttgtcgggtgactttgcgttttgggccgagtgacacctggcgctggaccttgagaatactcttcgtcatcgtcattctctgcatcgagttgtaacggaattataccgttcgcgactgcctgtcttcgctttctctccttccgttccttccgttctgcctcagacctcttcttcctctcttgcttccttgtgtggtcaatcacttccccgtttggagcagggtcattagatggcttgctgctggtggtatttgtcggggtagagctagactgggccttcgcatcgccggtggccagagcaggagtcgaggacgcgctattcttatcagccaatgtagcctggggatgcttcaaagcaccagcttcgtcttggtccttcaatttgagatcagccttcttagacttatggttagtagcttcagttagaggctgaggctgtcgtaattgattggttggaggagctccctcgtcatcgtcccgatgggagacacccgcaatttcaacatccacacagaacgctacgcggttgagcttggcctggttcaagtccgcaatcttgcatcgttgccgatttttatcgacattcatcacgcgacgttgagagaccacgacattgggattcaacttgggcaacccacccgagttggacgagaacttgcgtagtgcattgtgaataaaggagggtgatttgggcgatgtcgaagtaaaggactcttctttcctctcttcttccctgtccctcaaagagtaggcagcgccgaatgggttatgcgtatcaatggttggggttgttttcggactcgctggaggggccttcagactaggttgagacggtggggtagtcccagatgagaacttcgagcttagactggagatccacgagtttcgtcgtccgatgggcttagggtctgtctttcgcggcgctggtgatggcgtagatggcttttgctcctcgctcttctcaattggttggggtttcgcttgtactggcgctacattattctggggggctggcttcggttctgcggtggagggggctggcgttgggcgtggtggcgggttgctgttggaacgagatcttcggtgtgacttaggttggggggtcgttggctctgcctgtgtaccaggcttatcgcttgctgatactgactttgtgcgagacaagtgatctaaagactcaagagtatcagaagctatcccgacttcagatctccaacaaccctatcctggggttggggatgtgctggcataaaaagtggaactcacctttttgcgaatgatgaagccagctcacgtccacagtctgaactccttccattttgaaatcactcgagagtcaagagacggaacaaagtaacttcgcaatgtccaggtggttgtcgaaggtttatcagcggtgtggcgtcgtataaagaacgcaatgactggataggactagacagaacgacgcataattggctggtcccccacttttcgctgataatcgcaaaacagttcgaaaggagaatcaggtggacaacactaggggcccgatgacaacgaataaggtggaaatgctgggaaatgcgggagatggaatatgccgtataatctgcgaccaagagctcgccagatgcgttaaatcactattacagtaaatgacaacccaacatcatcgcctgtttcagcaagagatacatggtgaaatcatgcgaggggttactaaaagggatagagaaagtggcattggagaacttccgaatgcacaattaagcatagactaaggtgacataatcggggggagggggcacgtgagtgttctcattgggggagttaatataattggagtagaagggttggcgattggaccaatccggagaatgttcggctctccggtggcggaggacacaagaaccatggagaacaacatgtctacggagtacattattataaatcgtggagtttacggtggattagccgggagagccggggtgttagaaaggagtttggtttcgtaaaaaagggggaggatactggtgtcgaacaccataacgctcaatacgggtatccgcgatgatagaaacacctaaaaacgccaccatgtcctgggggaaaaacggccgggcagagacaacaaagaaaaagaaaaaaacctcccccacgcaaacccctcggaggggtagttatgcgatgaaaagaaacagtcatcacggcgtcaagcggacctcgggaactagggatattccgccgcacacaagcccctatctattccagacccggaatattcttgagatattcccagccatactcctcgtcgggtttctcggcttccatgccgagcgcaaagcggtaggcacgaacttcattctgcagaccagagatgacgcgagtagggacatcatcttcttcgcatttgagacggtaggcggtgcgaatcatttcggcacatttcatggtttgagcatgccagtagtcccggtcgagtcggctttccagatgggcgtcacgctcagcttggaggagattgttgtaatgcttcttctgagcaaggtagtgcatgttgttgttctggcagtaattgcggatttgctcgagcatgatacccacggcgtgctcaaactcccggaccatcttcatgttttcctcacgatggtatttatgatcggcactcacaagtttttccttggccagggcacgctcaagttcggcaatccgggcagctgctttaggcgttagtaaacgaagatgtgatcaatattcctaaggacatactaagattgtcaccctgctggccattcgggccagagctatcgacaataccgttcttctaaatgtgtgttagctatatatccaatctgagcaactcgaatgcatgttggcccacataccacaatctcctcggcattcgcgacgatgttcttggtcacatcccggttattcttcaagacgtcgctcagttccacaaccatctcatagagatgatgcaagtccatctgatggccagcgttcatcggaattgccgcacccatggcgcccattccgccgccattgatctggccgctgaccgaagtgtgggaaggggaaggagacggagtttggcgaggaggcatgttggatatgctcatcgcgctactactgttttcgacgtaacctgagaagttgccgttaccgttaccgttggtggccatactagacgtgttcgtgttcatagagacgtcggcgtcggcgaaagcgcgattcagttcctcgagttgagggtcgtcaggagtgaaggatttcggagtgctagtgccgttatcttcgtcgaaccaagaggcgtgattttccacgcctaggacctccgattgaaacttctcaaggtcacggcgagtaacgtgcgtggagcgacggcgatgcccacgcgtgaaagccttggaaggggagggggaagtgtcgccctcgatggtggcgggtgcactcaaaccagggacagtatcgtcactgtcactcgagtctgaatcgatagcaatctcatccacggagctctgatcagattcacaggtttctagtaggcagttgacaagcgtgttgtgctgggagctcacgctagcaggtggggctagcgacgggtcaacacgtgattggggtagctcacgtgatggtcccattccaacaagctccctcgtcttctcgagagcactcattcggatagaaaataagaactatgtggctgcaaagaaaatcaacaaaaaaaagtcatctaggaaagttggtttcccaacatatcggtggggcgaagcctatttctttccgaccggacaagtgtgtaagtgtaatggatcaatgacggtcgagagttggagagaaaacgggctctcgcccagtatgaaatgctcaaatttgctccggtccaatcacacgtgctctctgaagtctataattcaattcctgcagtcatacttggcacgtacttgccgttctcatgttttttgttgacatccatgaatgatgaggctggctatactagtgtcgccctgatggaaggtacatatggcaatattgaaacattgtagctagggcaacgtgctcgaaatccaagtagaaaattaaggaagctaccatcgaggcattggcaatgtgtaatcgtgtagtattgtatgcacatgtgggcatggggtattatagtttcgtcaaggcatatccaacagggcttgcaatctctgatcagaggctggaagtgagtaatcgtgagtttcaagggcaccgctgcttcttttctgttgtgcaatccggcctccaactctggctacgagcatgcgcattttctccaattcttgaacaagttctccatctttagtaataagattgggttgaatgtccttttggggatcttcaaatggctcgagtaatcgtcgaagatgttgcaactgatcaagccgccgttgccgttgctgcctttgactgtcgaggctcgcgagacgttcacggagctggaggtatctgtgcgacttggtgtaaggctggtggaacttcaatcagagaaaatccggatgtgtttgtaaactgaccttgcctgatcctcttcgcttgcttcctggctttccaatatgacaggcatctttgtgatgttcctaaatcattgtcagtgttgtcataccttgtatagagatggatggaaacgtacatcccccttgacaaatccgttgttttttcaatacctcgagcaaaagcatcccgacttcttgcctcttgactaaccgaagaccagtacaagtttgcaatctgttgggcgacatggtgtatcgcttgggaggaataaacaacgcgattgtgctgcttagcagctgcatttactatagtgctatgagtatcgtattcatcttgtgtatatgggcgcaaatccgtaaagaattgtgctgttcaattgtgatttgtgttctgacctttgtgtaggacatcttcaatgaccttgtcactcagatcaccttctgtggtttcagcagcatagtttcgccagtcttcgggtaaatcgaggctctcggagaaaatacggacttggctccagataaacgcagatttcaactcagatacagttcgagttgaatccatatcgaacaaaatccaatggtgttagagaagtaccattgttgattctccaaaagtcccgcgatcttctctgagcacgaccttatcgataagacatcacgtgtctctccataaatacgattttgcgggatggacaataacgatttgggtaatagaccacgataaaataagggaaaggatttaaagggtaacaattgaataatggtttgatctttcatacatgatcttagtagggtaataatgggaattcttggtgtggagtatatcctcggtctagagtgtatgtacctcggcaatctaaccgtccagatcgctttcaaagtatgtaatccaattcgtgcaattcccatcacaactcatttaatttacgagttagaaataaactgcagcatatcttgcagtgacccctatcatcactagcagcctccttcattatcatctcaagatggcagagatcaagcgaccggtgggcttactgttcgacgttggaggagtgtgtgtaagtcggccacttgacccataaattaaagatacatatctgacgaatctctaggttgcatccccgctacaagctattcttgactatgagattatccgaaacatcccatcaggatggatcaatttcagtatctcgcgaaccgcgcccaacggtagctggcacaagctcgagcgaggcgacatcggggtggacacggacttctttgcggggttcaatgcggacctggcaagcccggaactatgggcgcaattccaacagcaacttcaaaagaaacaaggcacaaatggttctaccattcctccaatgccgacggtggatgcagaatggctattctgggagatgatgcgggtatctcgcacgacagacccctatatttacccagctctgaagaaattgagagagtcaggacagttcctgatgggcgctctatccaacaccattatattccccgacggacatgaatacaatgaagcatccgaagtgaagaagcaattcgatttcttcatctcgtctgcgcacacgggcctccgcaaacctgaccccaaaatttaccaggtggcgttgcaggagatggacaatttagctaagagacgaggactagccggagctaatcccgacgatgttgtgttcttcgatgacattggcgagaacctgaagggggcgaagaacgctggcatgcgtacagtcaaagtcatacttggaaagacccaagatgcggtcaaggagctggagaagctcacaggccttcagttgctggaggaggacaaggcacgattgtgaggcgttatacatagaagtttgttatttcaagaagaatatcggaattatatgtagaaaggatgaaggattaagaattctatatcattttcttaattttcccaatttttccccattttcctgaattaattgtcgttgtttcttgtctttcccatggttaagaagttgatgttcactcgtcgccgacctcattttctggcgggggatgcagccacacgctaagcgaaatcccgcacaaagtcgacccacgaaaatttcccacttcctcttcttcgtccatctccagcgcccctcgacaccccgtcaaaatggtgagttcgatcgctgatggctgaaaaagccattatgcattccttttgcattttatttcctctccgattcccatcggagccgggtccctgcaagttgcttcggcgtaatttctgaagcgttaattgctgactcgcgatggtttacagcctttcaccaagaacgtgaagtccaacgcctacttcaggtgagttcaatccttttatcctgtgctaatcttttgggattttctgtttgctaacttgttttcaattatagtcgcttccagactaagtaccgtcgccgccgcgagggtaagaccgactactatgctcgcaagcgcctgatcacccaggccaagaacaagtacaacgcgcccaagtaccgcatggttgttcgcttcaccaaccgcgacatcatcacccagatcgtctactccgaggtcaccggtgacaaggttcttgcctctgcctacgcccacgagctccccaagtacggcatcgaccagggtcttaccaactgggctgctgcctacgccaccggtctgctccttgcccgtcgtgttctcaagaagctcaaccttgacgagcagttcaagggtgtcgaggaggctaccggtgagcactccctcaccgaggccatccagaccgatgatggcgagcgccgccccttcaaggccttcctcgatgttggtcttgtccgtacctccaccggtaaccgtgtcttcgctgccatgaagggtgcctccgacggtggtatcttcatcccccactccgaccgccgtttccccggttacgacatcgagtccgaggagctcgacgccgagaccctcaagaactacatccacggttcccacgtctccgagtacatggagaacttggctgatgaggatgaggagcgctacaagtcccagttcgtcaagtacatcgagaacgagattgacgctggtgacctcgaggagatctacgccgatgcccacaaggccatccgtgaggaccccttcaaggccgatgaggatgccggtcccaagaagaccaaggaggagtggaaggccgagtccaagaagtacaaggtcaaccgtctcacccacgccgagcgcaaggctcgcgtcgaggagaagatccgcaagcttgccgcataagcgtctcgcttcttatctttacgaccaaaagttcctaccaatatttcaattgagggaataggctactgccggcgttctattcatgtgatgtagtttttgacggatcatggcacataccactttttatttttactatcggaagggggttttttcctgggagcaattagttcggtgttattccaaggcaatttctttactcagttctaactgctccccaatgtccatctgtcttgttccctcatttgcctccttgcatttgcctgtagctgggacctttatagtgtagttgaacccactttccatcttgtaactattcttagtattgtgttatgcaggcgatattctgtttattctgatcattatgtttatgcacgtaattcttcgtaattacatcatgccattgtggttcgtcccaggttaaaattagatcgacgccatgcacacaagcgccaatgccgatatgataagtggctcccaaccccacgagtgcgttgccagcgcagcaacttagtggctgttcaatgagcaaggatcaccccaaaaaataaaaaagagcgctagatcgttccattgcctgccatcaatctccgctttaaggggccgttggatccccgaaaagatgaacctgcaattatttcacctcttgtatatatatcccccacctacataatctacacatcccaccatgaagagataccagcaacacacccacgcaagttggcaccgcgcctacacaggcaaattcgattgcccctggtgccaaaacactcaccggccagagagcacaacaccccagagcccgaaccacaacacccgcaaacccgcacaggcacaggactcagacaatggcaggtccagcagagcgaatgcgactccgacacctgtaggacaacggatagctcccgagagccccgagagccccgagagccccgagagccctgagagctccgacgttcctgttgaagagcaggctgctggcacaccgcccgaaccgcagaccccagagtcggctccagagtcggctccggacgtgaacgacgaagagacaccagagccggaatccgagtcaacttatacgccgtttaatatgggacggacctcgaggcacgggaataacgcgtcgcgtccgccgcttcccgaggagtggacgaaggaggttgaggatcaggaacatgggtaggagattctagctgatggctttggtcaccgctggttcgtcactgtgctgacgtgtttttttttcgatagtgctgcggaatggaatccaccgactgtggaaacttagcgctttgggctagatacgttctagggagtctcgaatgcccggcaaccacattgactctcctagaggagtctcgagaaagacttggttggaatacatcgagtcgaaacattcacattaaactacagatatcaggatcttgcttcgcacaagtttctattgtacataatttcaccaatctattttgactctaatcatacccccttggcctatcgtcatcagcagtcaactcgcttgatatttcgcaaatggcctccggcgttaagttcagtcctgcatcttgcaaggtagcggatcgtctgggcccgttcttccgtacattcctcgaggaggcgcgtggtttgagaactattccgcggtagttgattaatgagagatttagccaactcatagtcgcctgccgactcggtttctgtggaattcacccatgccatttaaggttcgtatgagtcgtcatcatcatcaatcatcagcctgggccaccagtgaacactctgcctcgtcaatgtcaccgagagcctgttatgcactgcactccaatgctttaatggcttctttgttatcttcactcgatcccttgcgtaggatagctttggccttatcgtaccctttgattagctctgctcgtgccttgtctaacaagttgagttctttgtcgatatctggacgccgagatcgaggttgaggccgaggtttccatcccagaccaggggcagaaccagaaccagcgtcatcatcggagttggattgaaatcctgttggcttagctcgagcggggtttgcgtaccaaaccttgtcacgagcaccgcgcatttctgcagccataatctggaataccttgcgaaaatcatcgggtttttcccagagaacacctatccttctctggttggcgcgaagcaacccacgatagtgaccaattctctgcgggttgccagacatttctgcatccgaaagctcgttgtcaagtctcacttgctcaaggcgtggatcggagtagtcttttatgatctggtcaatcaagtcacatggatcgagttcttcgtaagcccatgatatccgtattcgactgaattgcaatgccgacaaaaggaaactggggtcctcgcccttaatgctagacagtttagacttggccatagcccagtcttccttcaactcagcttccttggattgcttttcaagctctttgttagtgcggatttgagtttcgcgacagacgtccaaagccttgaggagaggttcgaggattttcttgtcagggatctgaagcagcagagacttggctttatcataatcatattgctcttttgcttcctggatcttcgctataaggtcttgcgcagactctgtcgtgaccaaaggttgagtatgtatgctgacagaagagctagccgggacgctagccgggccgttatgtcggggtcgcgaggcatgatgtgtaggcaaatcgtctgtcgacagggataacatgttagtatgtcctaataacactccacagcaatgatacaacataccatccgaacttatctcgacatcgaacccagtctgtgagaatgttcgcttcgcagcgccctgcgcaagaatgatttctaccgggattttaggtaatccattcacatagctttgcccagaaagtcttcctgcttggccttgaaccactggcgaccgcgaactcgattgagccatgttgcttcggttcggatgactgatggcatgtatatgggaacgtaattcatctatgagtggtgccagttgaggtccacgatcacacgaagcctgggaacgtaactttgtttgtaccagcgtcctgacacgtttccagtgccagcccgaaacctcccaaaattgatcagcaacacgatgccagaagtcgagattgccttgcgattttgtgtaacggcttttgtgcacaatgcagatttgaaacagaactagctgctgatcaaggctcagcgacggcaattcaggtcggtcccgctgatactctcggatcaccgtccaattaggggtcataatgcatgggtcgcgaggtattgcaggcagtgacgatgaggatgggctagtgcctggacaaccacggggctctacctgcgtagtttctgacggagggttctcagcaatgtggccttccccagcttgacttcgagatgcagttggtgatcgcatggtcggagctggcagacagtaccatgccctgtcgtaggtatcgcgcatatcttcagccatcatctcgaacaccttgcggaaatcatcgggctcgctccagagaacaccagttccaaacatcttttccccaacaaaaagactatgcaggtcggtggctctctctgggggcccattccgttctgcatgttcaaagtactgtgtgaatttcacctgttcaaggcgagcatcggggtatttcttctgaagctgaacaagtatttccatgtgctcgtctttgtgcgtcaaacgtgcctcactgtatgccaatgccgcaagaaggaatttgccgaaatcgcttttgatacgagataggagagacttcgccccctcccagtcacccttcatctctgcctctttggcttgtttttctaaatccttgtccgcctcgtaaaatgctgatcgctccgcttccaattttctgaggagtggtccggacaccgtcttcttcggaatcaggagcagcaacctcttggcttcattccagtcaccgcacaatgattcttctttgcttcgtttttggaattcaatgtcggcatcacttaacggttcctcgggctgtagcaagctcacgacttcaacatggccatcgcacctctctgtactgacgccggctgatgagttcaagaggattcgtccaaagttctcgccatccacttttagacgcagagatagagaagtggctttatcttggtcctcattgtgcagggcttccgcgaggtccactatgggctctaatgccatatggaccgatgccagttgtggatctgaaagtatagacttcgcgccgctaaagtcacccttagccaaagcctcgttgcacttgaataatgccactaatgctttgggcctcttgcctttcatcagagacaccagatcacaggccttagtcaagtcacgatcaacaaattgcgccaatacagtctcttcttgaaggcttctgttgtatttgttttgtatggcttgtctcctttccaacgcgacaaggagccggcccgatctcaccttgttctccattgaaagcagcgaggatttggctttctcccattcaccatcactctctgctttagcgctttccatttcgcgctgcttctctatttgctcatgtagacttttattagactcaaattccttgatgtatgattctggtttttggttgtctttgaattgaagcaggagccacttggcctgatcaaagtcacagcgcattgctgcggacttgacccgctccaatatggcttcttcgacgtcttgccaagtcatatccaaatcagattgaggaagaggcgttggagatcggtatctgtaatcggagcgtctcagctccgaccgccatttgatgaaactgatgtgttccatcatttcccataaaagtgattccatccggtaaccatcagggtcgacagggcgaacagtgtgatcccgatagcggtattctgagagctttttttgaacaaaggacctgacccgttcttcatgccagccagaggcagcatggaaatcatcggtaacagagaaccaaaaggtaagattcgaggacagccgcgtgtataaatgtttgtaccgtatgcatattcgaaggagagctaccggcgaaggctgggagccctgtgaaactgatggagaagtgtcccaattcctttccttttccatgtgccggactgcgtactccagatcacgtctccacatcgttgaagggaatgatacagagtactcggtactgccgacggagataggattcagcctagtacgtcggagatgaattaacatacgtagaagtgacaagggatatttttatactgggtaactaacttggtatagctgtctggtctgacatgaggacaatgcgacaggggtggaagcaaaacccagttaagcgacggttggaatgtgcggaggaagatacgcgacatgcgacgcgacgcggtgacccgacctatagtcactctaggaaggagtctagggactggacggtctactccttatcggagattggtctagggtaaaaaaatgcgactgttcatgcggagaatacatttttgaaaaaccacagttgaagtccaactggaaatcgcggtctttaggaccctaatgcaggtacgtctatgatacccactggagagctgtatcctttcgccattaaccgcctactcttattttttagttctcgctattaacatttaggcttggagagaataggaaataaaaacttatagtataggaaaatcaggttaaattcggtggagaagacgggaccttggagatgggactagggactaagatattcccataggagtcctatatagatctctacagatgactaggaactctatccgcctctttccgaattattttcaaattgtcaaggaaacatcacatatttccaatccgaaagagctagagaattgcccatgcaaagcccgcttgtcagtagccttaaaacttgctactcagtgactgcagttgcaacaagccttgcttcttggaaggttcctcgacgagagcaacattacggacgttgtctgctaaaggaaacatatatctcccgacatccacgcttgtaggccacgacgctgcccggaatgcagcttccgctagctttatgagcattagatcgcttccctttgcaccgaggatagtgctcccgatcggtcggtgttcaagtcttcctgagattcgtgattgatagggcatttgtccaactagagacgatcagtaatttactccggaattgtggccaggaaatgagaagaaagaagaggataagcactgaaagtactgacaaggtagcacaagctgagggattccaaggacaggagagatgaatttttcaccaatagttccagcactcgatgggctcctaggtctagtcagttctcaagaaatggaaaacccggggaatggggaacgactcattagcgatatcccggtacttcgggttagcagatccatatggcataatcataatggcatcagacagggtgtttggatcttgtgagaagatgttttcgtcaaaccatctctggaatactttcagttcttcacggtatgcattgtactcatccagagtaacttctttgccaactcccctaacacatttccggttagcttttctccactcggtaaatttcatatcttaccatctgtaacgcaaaactgggccttcaaaagggagtttctcatatttagattcatacttcgatcggaagtcgtcaaatccgtgatagtaatcatagcacatagaccagaacgcactctgtgtaagctaatgtaagtttcacatcgcttcgaactggtgaatgactggattaccaaccttggacaggtactgcttcagtggcttcccgttcgcctccaatggagggcacttttcccatctctcagcgatactaatctcgacccgcttagtgcccaaaaagttctcgaggatttcaacaaattcatccaccatagcttggtgctgggggttgctgtgggggaaaaagtcgagtggatagatgatcttcgacggaaatgccgtagagttgtcgttgagatccaaagtatgagaggcaatataatggagatctgacaagcttcggccgaataatcccacaacatcgaagtgactggttatgaatgaatcagagaagtcatgtggaagaattgactagaaactcacggtgaattcaaaactataccatccatagacgttgattcagtagatggtctgatggaaaatagcccattgcaagttgcaggtgccctaatactcccagcagctggagtttcaaatatcaatgtctttggttcgaacttggactccgggtttgaaaaagaaagacttacagtcaccaccaacagaagaatctagccacgagtatcctgctaatgctgcagctgaaccagaggagctccccgacgggctctggtattcgtcgccacgggggtttatggggcaatggaaatcaacccactgatccgtaggctcatcagaggatgcaaattgagtcatctttgtctttccaacaatgatcgctccttggtcaataagcttctgaacgtatgaggcagtcttctcttgaggagggtacagttctgtatatgcacgactcatcatggtcgtttttgttccgttgaggtggaatatatctttcaagcagacccgaatacctgcaagcgggcgttctggcgagacacgtgaatagaggcgactaggcactgcgacttctttccaaatcccgtcatcactgatagaactgaaaggattgaacctaatattgcttgttagagaataaaccgttcgctttcgccgcactcttctgttgtgaccttgagaacaaacctttcgggctggagaacattttccggcaagactccaaaaatgaacgcgtcgagacaatccgggtataggcgccaggcttggtgaatattggagccatgaagaaaataagggcccgctggcaggtcgagcgcgctggacgtgtacactgtcgaaaatttctgagatactaaggtggatttaccctgattcagttcttcaggagtgccggttaggactattgaacgtgagaattctctgttgtagacatcgtctacctgttcaaagagattcagttgctgcataagtctttcagtgttttcttgcactatctttgcctcaagaagaacaacagctttggtctcttggacgtgaatattttcaagaatagtgccctataagaacagctcaatataatcctccttaggatatagacgaaagcttaccagtgcctgtgggtgtacgagatatttagtactcgcaattatttgcgttataatctgatcaaaccccatctcagctatggggtgcggaggcgcgcaaagtggggataattggggataattgacttgaaggatagagaaaaaaaggaaggttgaaatattcaatgaatttgacacagtgctaaaggtcttttcgggactaaataggcgtaacgcggaagctcttagatggagggggtcgagtctgcccaacgaggctgatctcggtgtaagaaaaggcctagaaaatgtggcatgctgcacaataatctcaattcgtcccatcttatgtgcatgtgatagtactggctagcagacttgtttattaccggccgatatgggaataatggcgggacatcctatcctgtgacatctcgggtttagggctgcaggtggtgctcgaagaagttagccagcctcttctgattggactactatagccacgcagcaaatgttcacagcccccctcgtaatatacaaggatgtgctttcaaatataccctgtcactgcccaatctcatgcgtagcgcccgaaggcgatgcgaacaaaccggaggctcaaacagtcctttcagcgtctggactttgttatgcggtctctttctccctctcccgctctatctctagccataaaatcaaagccctccaagggagcaaagactaggctaaagttgctctgtgttaatcactgaatttggggtatcccaaggtcgtcagtcccaccggaactatgattgctcccctttcggttgtctacgacggtgtcagaaagcctgagattgagtaagttctcctctgttagaaaagaagttttgtcgaataaactaaataaaataataatagccttgtctcaattccgggccttccaactatccatcctacgtacaagttgaaagaccacacgaaatggcttcgggaagtactgagccatcaggtgccccaagcgcgaatcatggcatttcagtatgattttgcaaaggattcaatggaagtctcctgggcggaactatttcgaaatgttgaatacctactatacagtttggtacatcggcgcgagggcacagaagaccggcctgtcttattcatctgctacagctttggggcaatcatcctcaagaaggcaagtcacaagtagattatttattccacctccataattcgtagctaacattatgtatttcttgatcaaggctttgttgatcgcaaagaaaaccccgatattccgaaacattctcgacaagaccaggggtatcatattccttggctgtctgaacgatgaatcaaatccacaaatcgaggagctatgtcttaaatgcgctgcggtggagctaggagtgatcatgaagaacaagatgatcgacaccctgcgaaaaacggacgattggacaataattcgagacgtgatagagagcttccgcgttttgagatgccggttcccggtacgcaacctctacgaactcaggccgactaacattatgagccgtacactcggagtcaagaaagtaaagcgagaaatggtagctttcacccgagattaagtgtccaggttgatgaagctgatgagctaacattggtcaaagctatgcgatttacgggtatcgtccttaggttggtctgatgaggattgcgtgggcattgaaaaggatcatggggaactcacaatgtatccactcagaagcgatgaagatggatatttcgagacatttatgcgcacactcacgagaatgatcgatgagattgtcccaaggccaacgcaacaagcatgggaaagaaatgatcccgacgacgaccaaaactggcttgtgatggaaggaacttctagcaaccggtctgcgaatctggagggtatgttaaccctcaaaccatgttattttcaatatcttatctgacatatttatctccctgctacctttagctgatatcacaaagtcgatgttgtcgtataacgactcagcttcatttcacacatcacatggtactcatataccatgttatgtcatgaccccgtttgaagataatcccaatttcgttggaagagaaaaaactctcactgccatacacgatgccttggccccaggtagtcctagcgtcggacaaagggtattcgcacttacaggcttaggcggaatggggaaaacccagacagcagtacgttatgccttttcacagatggaagtgacctacaagattgtgctatgggcacacgcagacgggcagtccaaactttcagagagcttctctcttttcgcttccgagctgggtctgggagatggattgacccacgcaaaagccaagcaagcggtcaaagactacctcgcgattgtcggtaggagctatcaattgaaaccactattgattctgatctgacccttaatctagatgtggactggctcatgatttttgacaatgctgatggtgatgataagacggaactgctagcagaattttggccccgaggtgacaaagggtctatactaatcactagccgcgacaaaactttgacaaatcggtaccatgggagattcttaaaggagcttcattcaaaaaacgccgtggatcttctgctgaaactcactggaatgcccaccactaccacagaagagagacttgcagcccgcgaaattgtcaagagagtaggcttcctaccactaggaataaaccaggctgcaaatttgatcataaatctctcatgcactttctccgaattccttggagcatacgacttgcaagagctcattgaagactcgtctgatgtccagctcatatcggggggttcttacaagtactcgcttcgaacggtttggaacatgaacttcgagaagcttagtagtgcggaccaagctctgctgaagatgatctcgtttcttgaccccgatcgcattcaaatgaagttgctcctggaaggaggagcagagagcgcgaatccaaacctgcacttcattaatacttcttacaaagtgaccaaatgccgggcagggcttttgcgcagctctctgatctcgcaaaatgaacgaaaagatgagcttcagatgcatcgtctcgtacaagcatactgccaactcaaagtgtcaccagaagaagcacaacaaagttttggcaatgcaatctcgctcgtgaaacaagtctggccagtcccgcctcgatcagaggtgcataatccatctttatgggagagacaaagagctcttctgccacatgttcaaaagttatgtgagttttacgtggcatcttgccgaagagaccagcctcttatcccaaaagacgtcgtgaattgggactttccttccgtggtatacgaggcaagctggtgagaaaagaaactcttaggcttgaaagtagcaactaattaattcaacattcaggttctgctacgagagtgggatgctagagtctgtttcagacttgctgaatcccgcgaaggattactgtatccaacatttggcttctggaaggggttatcgcctgttggcagatatatatgggtgcttcggatctctatgcacagagtcaaaccaatttcaaggcgcctacgataacttcgccactgaatggaaatatctcgagaaagctttcgaagcaggggagcttgaaagaccaagtatttgggaagtctttggtttagggaggcttggaaacgggcaccatgggctgcatcaatatgcagaagcagaagcatactatcgaaaggcattggccgcctgggaaaatcttccaggtgataagaagctctggcacagtcatcttgcaacgtgtttgtggttacaaggtcgcccagatgaaggagaggtagtcgtgcgaggagtcatcaaagacgaaaatgacacaaccaatttcaggtaggacctagagttcacccctggagaccatcggtattcagtgctaatgcatgaagcctttagaactgcaatggcaatgtatgcactaggcaatattcaaattgcccaagctacaggtttgacactcgaaggaaagaaaaaggacgccgaagataagctagctgaggcaatgaatacccatgtcaaagtactcaatttgtggacgaagacattgggaccaagacaccacaagacctcggatgcaatgtacaaggtcggctggcatttgcacagacgccaggaatatgcccaggcattgtcagtctctatcgttatttctcgcctcgatggcctttctgcgtgcagtactgactaattgaattagggacatgttcgagagagcgttggatatctatgaaagtcagccgcatctatacaaaaacgaaattgcccgaacgaaatacaagataggctgcctgaagcaggatacacagcatcatagtgacggtgcagctttgatccgcgaagcggaccgaatcagacagcagatagtgccgccagaagactgggagcctgcgaagtgcgaggaggactttgacaatatagtccagttctggacacgataaatttgagagaaatggagttcggcagtcacaaaaggtcgcagcagagaataataggtcaaattgtaagagcaggtggcaagtgggaaatctgaattatctatcattcatgcccaatctctatcgtcgaaacttccatatatcggcagtaacatgataattcttgatctttctaatccattctggtccgtaaagaacagaaagagtcaaaagataaatccctattccacagccaaaaggccattgccatgacggaggaggggaccattcccgtatattcatgccgaagacaccagtaatgaagctcaacggaataaaaaatgatgccattctggttagcatattaacctcatttgcactttgcacccctctttccgagagcacaagctgtgcaaatccaaccagaacgcttgtggccgactcgcaatgaccagtcaaaagtttgcagcgttccatcattcgatcatagtctgcttgtagttttctttgaatgagttcttttcgttttatcgtggagtcggaagctggctttggccaagatgagcaacctccttcagtaataatgtgctggttttccgagagaagttccttgacccggcttatggtagcaacatgttgcctaagctgacccaactggaactgtagcttatcttgatcgacgtccagctgatcttggcattccgtaataccttgggcaagaacattcaaggtctgtgaccaggaaagaaatgacgtggtcagaaccgtggcaaggaggaagaatggatcttcttgcattaactgatagtccacctgatccctaagaactatgcctttgaggggatgaaactggtctagctgtccggatgattcaccatcatctctgctagggatcggtgcgctactctctgctggcagattgtaaggcaccaatgggacaataccaccatgtctagaccatggcagcccttgttccgtgaccattcggctactgtcagtcagaaatatgcctaaatttttgattagctcttagagaccttcatgaatactcaagctccaggccccactcaccatgccaattattccggtgcgtcgcaatagtgaaggacaccatctcctccacactgcatatgtcactatcatgcacaacaatctttcggacatgtgtggccccatacattctgtgattgaccaatgccttctcatagttgagccgcaggccctccatctcagctcgtttctgacgcatatgcagcgatgtttgaccggaaagacgggacgggtaaggagacatgggtttgacgaggcgggaaaagtgcacgcgcaccacattatcctgtcttgacggcagagttggtaactctggaacgctgtcactcagcttgaggctgacaggtaggtgctcgataaagaattctgggcggacggcaaactcggctcccagaaatgcgatgcagtcaggatgtgggaacccttgcaataccccaatacgtggcttgcagttttcatcatgcagcccagtagtgatgaacgggaaagcttttggatatacgtcatcattggagagcgggctaatctcaaataatttgacctcctgaagtctggactttcgttgcccggaacatgcatcaagaaagtccgccagctgttcgtagaaggaagctgcttctgggtgataccgataacaagatcggatatggcgtagataaacagaacggtcgtcggtgctgcttgacatgcttgagtatatgtcgaagtaggaataagccataaacaggaacttggtttttgttatgttctagtggtaaaatgcgctgcatggtttccgtcagtatatacaaaggcttcgagggctttgtctttgtccactaggtaaaaatatccaagatacctagcgttgaagttcagtagtggtgccaatctactcttgtttctcgtatatatttaattggcttccgggcagtgcaatcaatatattaaagtcagccactatcccactgccaccttcacccgggcatagttacgcccaccacatgtatgagttcaccaataatacatggctcccgtacaccttcccctctttcccctctttcccaatgaaattgttgatcgtctgagcgataacatcgcttcactttcgtgatggtaggtcttctccacctgctgtcgagagtagataaatagtggtgcaagcacagggctgatttacttttggcctatttgggaatcactaccatcttctcttccaatcactctactcgagattccttgaatcttgcttcactgcgcagaattcgccatccaagggtacttgatcgcaacaatgcatccacatgtggtacgcttactctagacatatggtgatatctagtaattctgacaacagctatttcagactcagcttgtctcaagcggcacggagtataccgacactcacgtcaaatcctgggctcaggatatcctgaataaggcatcgcaagatactcgccaacagccgtggaagcgtgcttttgccgcaaaagaagtcaatgttttgtccccgcaggtggccgatatcattaaatttgaccacaggagcgcctgtgctaacgctgaggctggaaactgagatatgatttagatagctatcatcaaaggggttggatgaagcattactatttagtcacttgaagtccgttgaatgtgagattggaatatgtagcaaacgtgagttgcctagttaatatgccagttcaatctatatgctgatttccattcttttgtgttttggtccaataaatccccggataaggctcaagtgaccacgtgtaaagttataaattaaccgtctccccccagggccgatgaatgccaaagccaaccttggaactattccaacgcttaataagcagatctgtcgtccaatcatctataagagtcatggagagaggcatatttcgctatctcaagtggcaggagctatacaaggttgaaaaacctttccaggtcctcattgatttgcctgaggatgctgaactgaagcggcaaacaaatatggaatttgaagatggttcggaggtgaccattacggatattcgagccgttcaaagtcgcccccagattgacacacacggatttacatatgcttatcacgatagtagtctcactgaagaccagtttcttgataaggtaaatgttgagtcaatatatcttccagagtgtgaggcactgcttcggagctcattggatggggtcgatgagatccatttcttcaattggctggtattaagcatacaaaagtttctccttgtggatatctcattgttaacacatgcaggtacgagataccagttctgttctatcgggcaaggaggtagatttgaacaatcctttggccctggttggacctgcaagagtcgttcatattggtaaggagtgtgacactttggctggtctatgtagcttctttcaagctaactttctgaagatcaaacatccactagcgcagtagaaagggtctatctcgagctgccatcaaaggcagagaaacttctaaaaggaagacttcgtctgattaagttggttcttccttcttttacgtgagtcaatatggtcacaggacatatgttgatcataattctagcttatggcgccctgttaatggcccagtggagaatttcccactcgccatgtgtgacggtcgaacagtgtcacctactgcacgagtgcagtcagatcgaatcagacggaaatataccggaggcacaacttttgtgttacaagagtctgagcaaagatggtactacctcagtcatcagaaaaataatgaggttactatattcaagaactttgattcggattatgatatgacacaaggtaagcaattgcgcataaaaagactattataagcaactgacatttcataactagacgcccctcattcatccttcgtgccgctagttcatacccctgggattcggcctcgccgaagcatcgaggtcagagcgatggtgtttacatatgctccgaattagttatgagatatatggcagcctcaaccatccgcagtttggatgagatttaccatgcagacagacaagtttttattttctcaagtgtaggatcaggatatgtactgggctgaagggcaagaacaatatgggccatttcgatcacctaaggagcttttgtttgttttgttttgtttctaggcgttttctgttactataggcctatttagtccaatttttatcataagataagcttcctaaaatcatggtcattctcctaagaaacgtactatacttaggcgatactagggctagccagatctaatagaaaaatgatgatcatcggttgttgtttaatgtccatctctcgagatatgggcgtagcccgtatctctacggcctcctatgggatatggggacgtactaagctatggttttatgtacaataatgagcgcccataggaaggaactccttctagtgtatgatctggcgtacggccaattggctgcccgtccttctgatgattatcggtggttgtctcgggcctcttttaacctgagtacaacctaaaattgcccccaaggcagtgggaaggacaggtgcagtgacatatatatatatccagtgtctttggtacttgttggaatggcagtgttgacaggtgagaagctaatagcagttactgtaataggcaatactccagacattggatagttgggatacgaggtgatggacaccacgggtttgacacaatgagtcttactaagctgtaaattgatacagctcggaacaatcccaggattgcccaacaaaatatagtcatttggcaatgccaagacatgttcgggcttggcaaactgttttctgccaagacctgtttatgtacataaaatagcctaaaaggggaatttctacattacttttgcataatcatgccttcaatttcaaaacgaccatggacatctctagcattggcgtctagactttctgacaaagcacagatacacatcttttatttggcgagatcgttggatctgaggcaaagagacagaattgcaaagaacgttgtacacaggttgcgaaatcccatgagttctttcttcccattgtaaagtgcttctatgtacattgtctaatatatatccccactcttggtatgggctttttacatctgtcctgctggttcccatcttgtgataagctacagatatctggcttgggacaggaaatgtatttacaacatggtccccgtccgatgaatattgtatcaaatgctgtggtgagtcaattgccaatcgcacttagtccagccaagaaaagagcacgtcgtaaaatgctttggggtcttggaggaagggtgcatgacctagaccggggaacatatggagcgtgcagttagggatcatggctgcggcagcagggccaagtacatcataatgtcccagcttcgcagcgacggcagggggtgaccatgctttaccaagtgccgaaacgtcactggcgcccaccaagaggtaggtacgcgtctgcaggagaggcagctggtagatgatcggctggctgagtaaagcgtcggtgacgagggccatcacgtacgaatagtcggagccatagtcgccggcgtagatatcggctagcatgttgacccaggcatcatattcaggcttccagggggcattggggaagtagttggcctgctcataggccttgagagtggtaaagttcgacacaataccgctcttgtacgacgcgtcaattgataggtagggcacacccttggctacccaatcctccaagcccagtggattgacgaggaaaagctgttggatgctggccgggtacatgaggccgtagcgggcggcaatcatgccacccatcgaatggccgattacggtgacttgatcgatgcctagcgcagtgagaagactgtggatattcaaagcctgctgttgcacgttgtaagaatagccttgaggcttgctcgatttgcaaaagccgatatcgtcgggaaggatcactcggtagccggcggctgacaggtgacgcgctgtgtcggaccatgtgacgccgcagaagttgccgccatgcagcaagacggctgtcttctgagtcttgttttgtttccttgccgggatgtccatgaacgccatcgtgaggttctggcgctgattggagaagttgaacagcttcaccggccaagggtaggggtaactggatccgtataagtcggctggcacatggccatcgtagatggtgccaatagggtcggggtcggactgtgcgcagacgacagtcgtacacgacagaattgccgagaaggcactgaagatggggaatatcttcatgatgtggttgcttgaaaaaggacgaagttcgaagagcacggctccctgtcaatcgtataagaggaaaatagacttattctttcacctcctgatgcgatatataccagcttgagaattattttgatgtgaaatgaaggcggatcccagtgtagctagcaccagagctaggggcaccgcgatgctacctatatgtagttagtgatctaggggctgatcacagcctttcctgtttcgcttctcagccggataggggcttctcaaatgcaatttcattagtaccaacttggtgtttttaatcaactgaaatttcactagcacgtacttggtgtagttaggtactgttgaggaggggcccggggtgcctgggtggggcgctgtgctgagtaatggccacctccagccctggagggatttcgatttctgtcttcccttaagcattcaacacgcagattcttcttgatttcgttcaaatgagttacttttagtatttcccatcatataaatgtacatctacttggttgtcgtcaatcgaccatccaatcctgggcaaattggcccccaaaatttctcaaactagcgccgttaacgccatgcagcgtgaaattaatcacgtatacatctttgcgacccccgcctagcgctccattttttcttctacaagggtctcggatgaaacgggtcaatgccccgatcaggccgcgcgatgtaacctgatcccaaagaatcgaaaacttccgcgaataggacccttgtcactctgctgcataacacgctaacacgctatcccgccggtaacgcggtaatgtacttatgtcggggtgcaaaaaaaaaaaaagatgtaggctgaaggcgacatcactactgatacggccttgaattactacatatgtatcgaccgtcgcctcaatcgcttttgcaagaccatactacccacccccaggcgacctctagcaatttgctatgtccaaaaataccccaggaccaagcagggcgttggagatccaagtgccatgtatcgtgttcctcgtgaccacgccggctttcgtggctatacgactgtggtcccgagtcaagtctaagtcggggctcggctgggacgactgtactattttggcgtcttgcgtgagtttttaattcaagagattgagcttccacatgcagatttaacgctcctatcaacagatctttgcgattatcgtcatggcttttatgctggcgtcctgtgcctatggctttggccaacacatcgcgaatctcacaacaccgcataagctaatgactctgaaggtacattgggaatccttctcactgcagttttctcgttctatattgtggctgaggatcgctgacttcagtcctgccagctcttcttcgttagtcaagctttctacaagctcaccatgaatatgacgaagatgtccatcctgatgctatatctacgcatttttatccagcgttggttccggatcacctgtcatgtgctcttggctatcatcacctcctatatggtggccaccttcttcgcctccgtatttcaatgcacgccagtggcccgggcctggaacaagactatcccaggatcatgcatcaacataaccactaactggtatgccaacgccggcttctcaatcgctaccgatatcatcatattgactctaccgatgtacccgctctacacatcgaaaatccggttgaagcggaaaatcgccttgatgggagtgtttgccctcggcaccttgtgagtttcaaataccgcagtgcaggcgttatctccagactgacccggagttttcaagtgtcgcgattacaagcattctccgaatgcagacgcaggacttctcgtccaccagtcctgacattacctgtaagtgtcctcatagtcaccccgaactgctcttactcaagcacttacgagatctacagacgacatagcctcctcggtatggacgataaccgaagaaaatgtggcgattacctgtgcctgcctgccaatgatgtggatgccacttgctaggctctttccctcggttttttccatagatcatggggccgacagccatggaagctcggctgccaagaactcggaacctaacaccacttcgcgtccccgaagcaactggacccagcttcatgcgtaccctgataccaagggcatcagtatggaccaaaccagcgattccccaaaccgctcatcggaagatagcgcgggcgagggcggcgaatcccaggatcaaatcgaaaacggcatcacgaaggtcacggaatactatgtttcttattctaatgcgaaatcgcttcgaggaaaatatatctctaggcccgaataggtcgaataacttgtggggtcctaggcacacgatgactgagatgtgttctgaattatcgctaaatccgtgcaatgaataaatgaaaagtataattaataaccttatcaacaaacagtcaattgttgtagtttgatcgtctctttgctttccttagaaggctattacaacatagtctctagattttgtagtagaagcttagtgaacttcagaagttcaactacaatgtacctaggtaatgagagagttatgccccgggtggcatacttgacgcccgtacagggacactgagattcccacggttgtcctcaacaagacaatatgggctttccgctaccgacggagttgacatgcaccattttggagtacatttctcacgacgacccccatttagctaaatatgcaacaattagtcgcgactggccggcgatcgtcgagagcagaacattctcatacctcaatatcgagacctccgagcagttagcggaattcaatgagctatcatggggtcaaagagggagctatgttcgaactctccatttgattgttcaactagagtcttactatgatgatgatggcgacgcgtgtttgcgctacgaaaatgaaggggagatgcaacgaaacaacaagctttttgacacatcgactcagtcatttttcattactctggccaaatggccaaaagaaggcgccggctttagtctttcgattgaggcccagtcccccgatgatattctagatcaaacgcccgaggacaagaggtaccgttttggtgatttccgggatcagagattcgaaagatcataccttcaattcaattcggagatcgttgctatcaaatggccggccatccctacagatatctcccttgtaatcataggcgggcatgatagaaggcaaattgaaccagcttcttgttcttttgtcgtgtcgaagttacctcgactataccgcctgaaacctaatttgaatgatcattatagataggacctggaactgagaaaacgctgtagaaacggtatactatatgacaatgcccggtaggatataatataataattggaaatctagatttcgcggattctattctactatggtatgccagtatacggcagctctgccttaacttctggtttagggcccctttcaattaagactctttcccaccggatttaacggtaaaaggaaagccagatatactaagcttgcgattgcgggagttctcgcaataattgaaagtaatgagcgtgacctaatttgtgcttggaaaaaaattcttctagcctatagataaatagaatcacaatctctagcttcccttttggccctatcttaccgatctatcggtgggatacgaaccggtgactccaagtggaaactggatattcgcagaggaaggagcttaagaatccgaatataaggatgattatcacttgagtgacccaggctccgataatgagaaggatgagaccgatgtaaattggacagccccggaggaccgcaatagcagaatatttcggtgtaagtacattcacgagacgttcgatgtgtattatctctcagctgccaatgccgctctttgtatacccaagatgaataatatggttttggaagtgacgaacgcctggaatatacacaagttcgtgtacactgtgaggaatggggtagcgaatgcgacctggttccatccctctgcttctacgagtgtatacaggccaagcgatagagtcttacaagtctggaagcaggttgcttccgcgcgtactagaggttttcttgaagttgaaattagccacatcagggggaagtttcattcaattctgcaaagcgtttacacggacgtcactttaggaacaaagtgggatcacgctgcaattgacaaccgacaaagagttcagctgtagtttacgaccgaaaagtaataggagcgaatggggtggtcggcgagtctgattgagcgggataccaaaactcatttcgtacttttgaatcattcaagggatcaggaaaaagctagaatacacgtagcttcagcaagagagatttaaaacaaacatgagcggcaacagttgtaggcatctctctcaatgttttaccggacttcgattctcaacggtgaagggaggattgtaaggaaagggagagattataaagcagtcactatgtgaatgaaaggggtagggatgtaccagagaggatatcaagggtccagaatcatcatcatagatgaaggggactggaaatggggacaaatttaaaatatttcacgggaaagacccacggaaaatagtactcagatcaaggtcgccatgattgcatttggatacaaacatgcatggctacaacgtattgacttttaaggacctcttctccaacctcgtgccactggctcaaggattgatgaaaagaaaatattccacgaatggaggtgccaaaggatacgcctgtcaatgacacgagtgccattgaacaaactgttccgccgcgctgtgcaatgcagggaccagcctgtggtgaaccgtcttgttgatcacagtcacccaaacaaggtaagtatgaagaagaaagaagaaagagaggaagaggcgggggggaggcatccttatataccttttccctggggcggtggcagattcatacagggcggtggattcatacatggcggtggcagggggcctaatcataagtaagacggcgctaaaccctgaaggcaaaactaatcagaacaggcagttcatctgcgggttacaaaataaatatacgaaaaaaagcaaggtaagaccatgaacagacatcttctccaagcgcccggacaagccgaacagttgatgaagaggattcgcgtcaatcgggggtagtgtaagcccgatgacactgtgcaacgaggcatgcgcaagcacagaggccaagtcgcgaggtccaaacattagaataatcatgatgttctgcaatgcagaactttcagcgattaaactgaaaagaacagatactacacttgatctaagccagaggcaaagagagctgaagaagaaagaagagaagacgaagttctgggggcagggccactttcttatagttatcctaagggcggtcggcttctgccactattcacaaatgagacaaacaacgaataggcccgcttaactatatatgtaaatggtaacgtgatgataaggaacggcgtctcttatttccggctgacttgtttggaactgtcattcattttttggagggagaccataatgtttgtttgtttctacaacatgggacctcgatcgtattttggacattacagacaccgccttattaatttagtaccgcttttgccaccgctttagtttcaaactccggtgaaccattaacaaacttaagtcactttgccatatcaaatgcttcattgtctacttcattataaaggggttgagctttataggaatcaggtggaatataccttcttttgatcgaaatgtaagttcttatactatgcaaagtagaagtgggcagaatatatgggagaaaaaataaagagtggcagaaatgtggcataattttaagtggcaccagatcaggaaggcggtacttagccttcaggcaggggccgtatcagttcctcgctcccttgcttcaactttaccagcttcagcaatgcagctgtatcttattcgccatgcggaaacagtacataatgttgcaaaagtcctgtaggaattgatatttctcaattggcattcccagttgacttgcactgacttcttgtgatagggcgggcaccactgattcggcactgaccaaccatggagtggctcagatcaattgccttgctcagcatttcgtctccaattcaactaaattcacgacggtgttctcttctgatttgagccgagcacgaatcacagccgagggggtctgtcatgcacaggttccatcctccggtgaaacacctttgcaaccgatagttactcaaaatttaagagagaaagattacggatcgatggaaggccgcttctggaacacttctcctccatcgccaaggcctcgagactgggctatccctgagtcaaaagagtcgatgagaaagagggctgaaagctttttcaacgaacacctgctcccactactgatgcgtgatccaaacggccgacagaacatcgcagtggttgcccatggcattatcctccaagagctatgggcatattgtattgagatcttcaatccaacagatacacagattgctcctcgaattcatgacaccaacatgactacgcctcatcggaaacctacctggtcaaacaccggctacatgactgtactgattaccccagacgcgacacaaaagactatactgcatactttcatgccgggcttcgcatttgttgttctgagtattgacgagaagaaacatctttccaatctccgtcgcactaggggtggcgttggaaccgccgcgcatgacgtgaaacaaaggaagattgaccaattttttcgataatcgactttcaacagagaaactgtggcgatgtacaagttctaccatcttcacaatgacccaaatatttagtccgtgtgaaacacctcatccaagggcttccaccaccctggaccctccgcactactcacggctccgggaatgggactctcctaatcgtgggttattagcttctgcatctctccatttgtattgaatcctcaatatacctgcatcccatcggtcatagcccaccactctctcatcttcggcaatgaccgcatgttctccatatcagcttcgatatctgttccgacgtacttgaaagtcgcaaatagagtccgatcgttgtcgaagtagattgagtctgtagaaaatataccatgttagccagtttgaacatccaatatgatcgtacatatttttggcattgaacctacagtctacaatgttgcattccttgatcttttgaaggatctcaggccaaacattggcatggcactccttgtatgctgcaacagctaggggcttgaggtggacgatttgggcgaagcgacggggttgaggttgaggcatgattgttcgatatagattaaatatttgaaattaaggcgaattgcaagagacgaccaactgccttttatgccccgctctagcttcaacccgcactcggagtgcgttaacccgagagcttggcatatatccacatgcatggaggcggcttgaattaatatggtcacgagacatcattagaatgtagatatatggatactactccgtactagtgatagcccatctacatggatgtacttgtaatactagtggtaggttgtactttccccttgtatctaaccccccctggacaccccccccnnnnnnnnnnnnnnnnnnnnnnnnnnnnnnnnnnnnnnnnnnnnnnnnnnnnnnnnnnnnnnnnnnnnnnnnnnnnnnnnnnnnnnnnnnnnnnnnnnnnnnnnnnnnnnnnnnnnnnnnnnnnnnnnnnnnnnnnnnnnnnnnnnnnnnnnnnnnnnnnnnnnnnnnnnnnnnnnnnnnnnnnnnnnnnnnnnnnnnnnnnnnnnnnnnnnnnnnnnnnnnnnnnnnnnnnnnnnnnnnnnnnnnnnnnnnnnnnnnnnnnnnnnnnnnnnnnnnnnnnnnnnnnnnnnnnnnnncccccacctccctaatctgatcactgtgtcctattcaaactgatctcgctggtctcttttctgactctttctaatttcctgattaccttggtctcagcctgcgacttaccacgatctatccgaagaaaacactgaaacaatgacatcaacaattcccgaacttcctattttcaatctcggcccgtccacactactggatattgcaacggacttggtcaaccgggttcaacaagctgcgaatgacctggtcaaccatgttttgccgcaaaacgtgacatttgagaatactcttcacccactgacaaatattgacaacgagatcaaagggaaagctcaatacctcgcccttttccaggcagtttccccttcgtcagaaatgcggacgacatcctcaacagctgtgaatatggtggataaagcatattggggtgtcttccagataccgtctctttttgctttggtcaacgttgtttataagcacgaggaggatagccacgccgaggaaaatgcaaagagtgaatatcgaaaacttcaatgagcagtgatgccggcctccaataccgaaaaatgatactggcacctggtggaagtcaaaatgagatgatggcactcaaggcattcttggggaggtcgcccacgcttgacgcatatcttcgagatcttggtgctcgttgatagagcaagccgtgtgattatgagtgaatagaacaagtctcactgactctaccaaagcctcaaataatactgattgggcacacgtcgtactctgcttcggtctggttgtcggtgtggctcttcggcaaggcaggattgaggcaccaacggccataactggccagccaaggagtgtaccttgtatacataggattctggacaagacatattgtagtaagccccatgcgcaggtgcctgaatcagtagacgaagtgcattattgattattgatgtaatcaggctttgactgtcttcgtgcagattgacaggcatcccctttgtggctttcaggtctttgtcgctgtgtttccatgaagctatatagaaaaaatctcggaccggctcgcttccgccaaatacagtttagccagtatccacattgggaatgcggaaggcagatcagtctccactctgtgtctcttggcgttatcagcatctcaccaattgttcgcgggtcggatatttgggtcgtctgcatttttatacttccccatttgccacactacgacccatggccgacaagacaaatcccaaggggacagccccttcgagcgaccctcctcccggccacgagaacacctccactaagtctcaaccaggctcagtgccccctgtgattaggcaccagccagggcgctaggcgggcatgactcaatttacctctccagcaaggccaacgcctagccaaactgccagtccaacttctagtagagctactagagcttcgccccttacaactgaagatgatctcaacctactatgcattgccgttgactataaagatcggtttactaccatgaagggtaatgccgttctttatgaggcgaatgcagaagtatggagagcccatgccgggcagaatatcagtcaccaaacggttcataagcacatcactgacaggctaaaagagcattccgccatacttgctataccggaacctgaccgcgctaaactgaacgctaccgaagctgctatgtttgactacggcaatgagatttacgaaatgctacaagagaatgcagtggcagagcagcgacgaagagatcgcagggctcgtgcggatactaaggctcaggcaagtaccgactctgtgcgggatgacacagccgatgaattagtgcaaccagcaagggaaaaaaggcccagaaatccggtggactctgagaggaagaaatgcagcaattaacctgtctacgtatagcataccttactaattataatatagaaagtgagcggccaacagcccggccacgaaccctacctccctcgccattgccttcctcgccaccactgcaaacagaaatcgctctatttcttagtatgatgaacagtcgagcagccctagaagcttcaaccggggctaaaaaggaagatatcactcggctagaaactcgaatggatagcatggctgttactatggagggatgatgagtttgcttagaaccattacgcacaggctgccaaagtaattaaacttcattttcatacaaattaatttacagaacgaatctcaactgtacatacacttaaagtatcgaaagtattagtatattgtctctttcatgatagggtctgactcttaggaataggacgaatccaagaaacggccaaattggttgccagagatatcacaccgatgatccatagggatcgcccgtagtttgacccattgtatctgaagataatagcaaagatgatacccccaagattaccgagaccaccaacaattccagaaacaatacctagtgacaagatgttagctcgatatttaagaagtaataacggaatcacgtaccattagcaaaaggatacacatgagggacaagagcaaagttagccccattagatgcctcaatgaagaaagccaggccggcgacaagaccgaacatggtcgcttccgtggacgggttcgacaacccgatcgcaagctggaaagctcccatgccgatccccaaaaaggcgatcaaaatctttttagaccaggccgtgcctgtatataggtaaaccaagtctccaaatagaccacccgcaggccgacagacgacgttgagcaggccgaacatggcagcccactgtcccgatttcgtttggctcatgtgtgggaattgttctgtgtagtaagatcccaccatcgagttgattgctagctctgagccgaacgagcaggcatagggaattgccagggccatagtggatagactcatggctacgttcagggcttctcgccgagtcggggagacgactgtctcttgtcggaagatgtcgatctggcccgttgctggtgtatcgtctatgacatgtggtgattgggtacctttcttttcgatgtcgattgtggcggcattgtggggtgtcatcgttccgctcgaagaagtgcaggagttgatgtcgacgatgttggcgttgggggccgaggtagtgccatttgaatctttcgcccagaggtttctctcagaccactttcctgtcggtgtatcttcgcagaggactaacatgcatagggcgacagcggtgatgatgatgaatggaatgacgtaggcgatacgccatgctttgtgagaagggatgccgcgggattggacgagggagtcgtaaatggcgggcattacaaagcttcattgctttcgttagtggattaataggagaaggggaaaaggtagacacctactatgtgattcctccgcctgcattgccccagcctccagagagagaattggcagcaccaacaatgcttttgtcgaagaaaccagtgcaccagacctggcatgggacgaaagtgcctcccagaattccaatgaaaaatcgtagcgctattaggcccttggggccagtgacgagaccggccatagcagtagggatggctccgcatagaagtagtcctacgaagaccaatcgtgggccataacgatcacaaagtggccctgcaacaaatcggacgagtagactgtagcggtcagagaggtgttttcgattgattccatattgtggtacctacgttgccaggagtgccacaatatttgagttggcaacatcttcttgtgtcattttcaaatcctttttgatagtcacattcaactgggaagccggagattagagactgcgttcttttggtatataaaacctgatgggactttttatcgtgaactcaccagtggtggaaaggcataccatgataggaatgccaccatgaagccaagccatgagaagaagaacacccgtccatatttatcgaaaggattcaatactggaatagatttcgctttgtgggtacttgggttgatttccggtgatacatagaggcgtttaaaaaaccctggtgccattttggttggctctttgtgtagtcgagcgatgagatgaaagtaggctcggattacttgatataaccttgtggattaaatggaagtaagagctctttcggagatttaggagaaaattcaagaatagatagaccttcgtatctatatagacgtttagtgtgctttgctagctgaagtatatatcgcaactgcatcttgccatgacacatgcaagcacaatcagtctgatattctgcctgtcaggttgtccaatcaccgcaaatagccacgtgctgtcaatcaaaaagagttagtcaaggcaccgagtactccgtatatctcaggtcgctgatttgatacagcgtaaggacaaggttgcagcaagatcatcagaccctggaatcaatgcggaacttaatttttgccccagacttcatccctgaaacttccgcagtatcctgccatgatatgctggtagagataaggtacgaagtagaatgacctatagcagtgtaggatgtatactgtaccagattccatgattggagggaaagcctgatagtgtgattcagtccagttcatataactccgcggaccttcaattgacttaaagcttacatcataacgttctaccgaacctaggaacgggtcttttgctccacgttgcccagaaatccatatcgttgataaacgcgggcctcctcattggatgccaagccaaccgcgataggaactgaagagttcagcccgggtctttgtattggacgaccttggcgatttgagctccgcggaaatacttaattctgactgtgactccagttaatggattcagggttctgggttctggggtgaaccctaccgaagatctggtacaatccaccggtctaaaattagggcttcttttagcaaacgctttctaacaatcggcctgagtatctcttttccctgtaacttttactatgagcaaaattcaatatctcctatttacttgatacaccgagataagaggatttagcgttgactgtagaaataataggccgtggcagtttgtacattcgctagataattagtcaatagtactcagtataccagatataggagatcttcatgtgttgtcaaaagtcatccagcctcatcactgggtaactcttcataggtggtgtataaatacctgtaaccactgttggttgatcagagccaggctttaaaccatctgatgaagagttaaaggaattaataagaacctggagatgagagtcgtctaatcaattccatgtctcagatatgtatcgaggtcaccgtctttatatattggaatgacctagcatctgaagatgcctcttatgtggtctaaggcggcgatatatactggcttctttggcaatatttacgtagcatgtgatcttccatcggtccaggaaaagaagtagtgaaaacaatttatgctaagcgcatacattctcaagtgtactcataaggccatttttcatctcgatgttcccatatgcaacatattccatcgcataatctgcaactaccaatcaatggacttggctggttgcaccgctgatacaccagtcaaaaagccatcggtgaccttcttccccttcatacccttgaacttcttatcaaccttgtggaaaggatcctccgtctcactcttacgcactttccacttctccgtgcccaaaatcgaatccaactcctcaatcggcggaagtttgacatatacccagccatcgtccctctcctcaacagggaacgtagcaatattcatactctcatcatttgagcaacgacccgcctgttcaccgttgagctcgaagttgcgcttgtgatacggacacgacacccaatatttcccagcatcatcatcgccaacgaggccatcagaaagaacaaaagctcgtttgtgcgggcacatctgctgcgtcgcatagaacttgcccttgatcttgaagatagcaagctgcgtgtcaccgcgcttgacattcgccgatgacacctgaggtggctcgtcggagaaatgatctgctcggacaactggctgccaggagacacttgaccacttgtggcctttgaaatcctctcgctcggcagagtccttgggccagtatgtgggtcgctgctgggatcgttcttggataacttctaccgtctcgaccgtttcgtctgtgtttgcaaattgttggaagacttttcggcgcttggggtctttgacggtctcggtccactcgcagaagtaagtatcgactagttcgcgcatttgcttttccatgtcggcgcagatcccaagtttatcatccacgatcacttctttgaggtagtggattccgcccggaagattttcgatccatcgtgctgttcgctggagcttgtcggcggtgcggatatagaagatcaggtagcggtcgattatgggcatcaccatctccgctggcacatctgtaacaaggagttcggcgtgtctaggttttgcacctccgttgcctccaacaaatatgttgaacccattttcggtggcgatgagcccgaagctggcaactattagtcctgagtgttttcaccagcgtaggatttgcactcactctttgttttgggcctcggcacactctcgtacgcagccagatacagctcccttgaatttatgaggcgcacgaatgctcttgtatcgctcttccagtcgaattgccatgccgacactgtcgccaacaccgaagcgacaccatgtggttccaacgcaactctgaacgttcactgtcagttggtactctcttgaagataattgctccacgtactttgattgctcgaagagcctttgcatatgcgtgtccgctctccatacccgcatccacaagttccgtccagatatttagaagatcctgcttcttcgcaccgaacatgtcgatgcgctgggcaccggtgattttgcaatacagaccgtatttcttggctacagatccgatagcaatgagtttatcggccgtgatttcaccacctggaattcggggcaccacagagaatgtgccgtttctttggatgttggccagaaacttgtcgtttgtatcttgcaagtcattgatacccttgtccatgacgtgcggattgaacaaactagacagaatggaaccaattgcgggcttgcaaagttcgcaaccaagagattctgggttctttccgacggctttcatgatatcgacaaaggttttcagttgcttgatggccacgatgttgtatagatcggctcgggagtagggaatatgtgaacacactgaaaatgttaatgatgacaggagctagcactggagaaagttgatattacttacggtggtttgatacctcttgtcccatttcaagcattgtcttgttgaagattgactgaacaagaggcatgcaacctccacagcctgttcctgctttcgtgcatgacttgacttgtgcaatggttgtgcatgtgccattcttcacattatcggccacatctcccttggtgacattgtggcatgaacagatctgagtgctgtcatcactgcagagatgagttagaatttctccccaatagcagaactaacgatactcacaggtcatctgcattttcctccccgccattttgggcaccaaggatgaattgacttggaggaacctcgagttctttctgaagcttaaccatctgattcaacttcagatagtctttggtatctccaatcatcatgccaccaagcaagaatttgccgtccatagtaaacaagtacttcttgtacactccactaaaggggtccttatatgtcaaagccttcacaggaggctcctctagtgaagtatcccctcccagaccagggccagtggaaggtcgacgaccgggaagaaatttcggcccatctctgtcagcaaagaagtcaccgaaactagcgacatcaactccgagaagcttcaactttgtgctgaggtccggccgcgtgaaacccctaggctgtttatctgggttggtcagattgaaggcgagcacatcggccatctcaatgccgggagcaatgattccgaatgtctggttctcccagcttgcgcattctccgacagcgtagatatctgggattgaagtttgcagactatgcaagttagttggagactgaccaaaagactgttaatggacgaaccattcatcgatcacaaatcctccacgctcaccacactggatcccaatgttacgacccagctcatctcgaggttgaactccaatctaagtctgaatcagcacatccatcatcagacgaaagcaaacaaggacacataccgcaaagcaaatacagcaacaatcaatgctctcaccatcctcgaaagtaatccctgtcacattatttccctcgtcggtatgaacaatcttgacccgtttctgatggagaacatcaagtcccaactcctggatcttgcgagtgaccaaggaccctgcatctccgtctagctgtcgcgccaggacccatttattccgatcaatcaatttgacatttccgaaatcctccaggtctgtcatcgccttcgcagcttccaggcctagtagtccgcccccgactgtaacagccgtttggcctttatgctgagcagcaaagtcgatgaggcgttccaagtctgagatagttcgatatacgaagacgcctttggcatcgtaaccaggtgtgtgtgttggaagagttgcatcggagcctgttgcgaggacgaggatgtcataggctatagtgtcaccggtggaggtttggacagttttctccttgggattgattgctgttactcgtgtgttgatgtggtgatcgaaggatcgttctttgaacgagtcatactaataaggtgtttttttattaggtcttatgttcttcgctctcgaataggtgaaggcttacccattccgttggattgaggtataagtcctcaatcttgcgatgctcgaaaaacgacgagagtccgacgcggttgtatgctacatgggactcttcgccgatgacaacgatgtcgtattttcgctccgtatcctgtttaataatcttctcgctagtttttgttagaaaatttctcatgtccgtcgttgaattttccttacatgagtgagatagccaccattcccagcccaactactacgattttctggcgctggacatgagttgcaggactagggctgccatcgactggctccccatatcgtagtccatccagcacaggcatggttgagactggacaaggtgagatgagtacggtacaagcactgacgactacggaacacggcaatcattctaattttaagaaaagtaaattgtcccactgggtgtgtcactacaatgagattcgtacgaatgaacaaatcaaggctaatctggtcatggaatcggaagaatcaggaaagttctctcaggagattagttggttcgatctccgcggagatgatgtttttatgttggctgtgattggctgttagggtttcgggtttatctgaacgtctaaagataagaatgaacaataagatacatacttgactagacttgacgaaactctgatctcacggcatgtggagggctgtggatcagaagggggttcagggtccgcggagatctgaaaagtgctatactggcgatgatattggggcggagccgaggatcttaggcctagatgctgctattccacagcaaaatgtgaatatttggacgtttaggactatttggattcattctactcggtttttacaatatttttgatcttattttagagcaatttcgagggtctcttataccaacaatttgataacagcctcgcgccagcaccatcatggccagcataaccacacagacgataacagagtcccaaacgatctctcaaataacaatcgagaacatcataccaagtccaggggagctagacatcccacttccaccaccgtcgaagaaccttgtcgacatcttggatgtggataaaggcacaccggatagccatgtacctcgcgatccacgattgattcggttaacgggagttcatccattcaatgtggagccaccattgacggctttatacaaagaaggtatctattcccatatgtcatagcgaagctcacaagctaagcggataccgaaggctttctcacacccccggaactgttctatgttcggaaccacgggccagtgccccaggtccgcgatgaggatatcccagattgggagattagtatagaagggtgagtgcgatcgaaattatgctcgcaggcttcgaacgggaactgattgatgagctaggttggttgagaagccattagtcctgagcttctgcgaagtgcttcagaagtacgaccagattaccgccccgatcacactcgtatgtgcaggcaacagacgcaaagaacagaacacagtccggaagtcgaagggcttctcatggggtgcggctggtttatcgacagcgctattcacagggcctatgatggcggatattctacgcagtgcgaagccacttcgaggagcgaagtatgtctgtatggagggcgctgataagctggtgagacttcctatatcaagatttgagggtttcaggaaccatcctcgagttaagactgacacattccatagccgaatggattttacggaacttcggtcaaattgaactgggccatggacccaaaccgaggaattatgctggctcataaaatgaatggcgaagaccttcggccggatcatggccgccccttgagggcagtggtgcctggccaaatcggaggtcggagcgtgaaatggctgaagaagttgattctgactgataccccaagcgataactggtatcatatcaatgataaccgagtactcccgtaagtcttacgctaaacgatcgcgcagtgagtcatgctaacagttgtcaggacaatggtgacgccggaaatgtcctcccaggatcgcaagtggtggaccgatgagcgatatgctatttatgaactcaacgtcaattcggtggctgtgtatccacaacacgaggaagaaatcgatatatccacagctgggcccacgtatacagtcaaaggatatgcatacgccgggggtggccggaggataataaaagtggagatttctctagacaggggcaaatgtaattgcaccccggaccaaaggatggaacgtggctaacatctctggtcctttagcatggcgcctcaccgagatcgagtatgcagaagacaaataccgtgattttgacggcgacctgttcggtggcaaggtagacatgtggtggagggaagcatctttctgctggtctttctggtcgttggaagtcccagtggcagacctagagactagcgatgcaatcctagtccgtgcagtggatgaggcattaagcgctatgccgcgtgacatgtactggtctgtcttgggcatgatgaataacccctggttcagagtggcaatcacgaaacaaggaagtacgctgaaatttgaacatcccacacatccagccaaagctggcggatggatggaaagagtcaagaagactggtggtgacctgcttaatggtaactggggcgaaagggttgaaggcgaggagctcgtcgaaccggagcctatgcaagaaataaatatgaagaaagacggcgtgaacagacaaatcgacctgcaagagttgaaagctaatagcagcagcgaaaagccatggtttgttgtaaatggcgaagtgtatgatggcacaggcttcctcgaaggccaccccggaggagcgatcagtattacatcttctgctggtttggatgtatcagaagacttccttgcaatccgtgagtcgagattaaaataccttcagactattgcaccgctaatttgctcttagacagtgaaactgctaaggcaatgatgccggattaccatattggcacattagacaaagcatctcttgaagcgatgaagagcgattcggctgcggattccgatgagccacgcgcagtgttccttcagtctcgagcatggacaaaagccactctcacagagaagagagatgtatcctgggatacacgggtattcgtgttcgacctggaacatgagaagcagacgctcggcctaccaatcggccagcatctgatgattaaagtccaggatccatccaataacgaagcagtcataagatcctatacgccaatgtcagacacaaacctgataggcaagatggagttacttgtgaaggtctacttcccaacggaaagcattccaggaggaaaaatgaccatggctctcgacaagcttcccctgagctctgagatcgagtgcaagggtccaacgggccggtttgaatacctcggcaacggccgggtttcgatcagtggtaaagaacgccagctccgctcgtttaagatgatctgtggaggaacgggaatcacaccagtctttcaggttctgcgggctgttatgcaagacacgcaagatcccacgacatgtgttgtgctagacggcaacaggcaggaagaagatatattgtgtcgttcggaccttgatgcttacgtggagactgactgtcggaaatgcactgtcgtgcatacattgactcaagggtcggataggtggactggtcgtcggggccgtatttctgaggaactgctcgcagagtatgcggctccagaagagcagagtatggttctggtctgtgggccagggcctatggagaagtctgctcgcggaattcttcttgcccaaggttgggccgagtcggatcttcacttcttctaggtttgatgtgtctattttgcatatcagggcatgtaacattggttgtgtttgagttgtacaataaaaatggatatgaggcaacaacggaagccggaagggtatagagacactgggctttcatttgcatagacacgaaatgaattttgaaggaaagtcgtcaatcatgagttgtaacatgtccaagcagtacagataaatcgggtgataaaagtaccaactaagctccagtaggttgctctttacacattccgaatgtggacgaattgcttccttcaatcaataatagttcttgacgtctaatctcactcgtagatgctcaaaaacgctggttgggtctgtccgcgaagagaagaattcccctgatttagccattgatttcgaagtggcttttccggactccatgctgcgaaggtaattgacaaaggcggaggtctgttttctgaaagactgatacaggtggagaacagccccttcgctttcgttgcgcatcccaattccatctgcccttgagagaaggccgaaactgagaatagtgccgaaaattgactcgagcagtttggcagcctgcgcatggcgcttactgaggaataatgcgaacaacatctggtcaaggatatcttcgtgatagtcgcgaagtcgtggtaccgagtgagccgcttcaatcgtaccgtcgatgtcaccgcggttgaggcagtgctcgattttggtaagtgtgtcttgaaagcgctgccagatggacccaattccaatatggaagcagtaatcacttaccgctagcacaaagtgctgggcatccattctgaacttctggtacacattgtgtgtgtctcctgatagagatcctcgggcagtagaatcccggataagtcgtttaacggcagaagccatgcggattaaccggagcaaatgcttgaacagacaatcatacttattcaaagagcgagcagtaatgagagattcaagaacttctggtggtgtgtactgcagacgaaggaagtccaaagcctctattgcattcggatttttacatccttcaatttcttcgtctgtcaattctcgaattccgaagctcaggccaccaggcaattccttgtccttctgggcgtgcgttttttcgtcatcttctgtatttgtgccaccaaagtaacaatctccgagcagaccaattaagacgagtcgcaactctgaactagctggcggccatgtgtcacgactgccgaggcgtagaccggtgtcgacaccactgcgcacttttccagcccttcgctctccactttccatttccgggtcgaacagtgaattagaaagacgagcgacaaacgagccctctcccagcaactggaaacgccattgcatgttcagatgatggcgaattcgatgctctttgaagagaaggtgcaggcaagagtagtcgatgagaagtgcctgtgacgaaagaatgggagcaagggataaatggaggccatatgtcaactcaggaccaagatagcttctttcattggtatcttcggcttcaaatccccgggctttatcgagcagtcgcttgaggccatctttcgaaagagccttgtaatccgtcactggtcctgaatcatttttttcatcgtcgatatcgaagagttgaaaggctgtcgttgtaacctctgtgttggcagtttgatcgacggtctgggtgaccacatttgatgatgaatcctgcaagcctgcatccccctgatgatatttcttgatctcagcgcggagtcttgactcgtattcctgggcttttgtttgaatttgctcaatgccagcccaggtggtcgcacaatgcagatggagaccaccgattcgtgagagaacatcgcgccgtgcgataggatgacgaggatgggatcgtttcaatagttgaagacttcgcccacactcaaagatagaacgggcttggtcggccgggatgaaagacggcatgtgctccgcttggtagatatagtcaattcgcgctggcccagtcttgaacttgccacggtcataagtttccagtcggacgaagcttttgtcgtttgtcatatattctttgagagctgcgtcttcggatctaagcccaatccaagtctcgatgaatccgaaccatggctgagtcactcgaatcacaatctcatgcacaaggttctcgatccagccaaacttctgggcaaaaaaagctgcacgttccacgacaattgatatgacttgtgcgtccgagacagccctttgtgcagcgccaacaatagctgccaggacgcctaccacgtccccgcagcggtgaaatagtgcctttatttgtagaagtgaagcaatattttttgaatgatcggagatctgttgttccaggttaaagattattatctcaaccgtgctagttaatgtgaaaaacgtagaaagttctctgtagttggctggcgggtcttgggcaaataaccgcaggcgctgcatgttggtaccgcattgtaccacattttcgatcacattttccaaggccatcaggctaataccagagactcggatattatccttcaaacatctttcaaattggttggttcgttgatcgtagcgaaagaatgcagagctccagccaagcccaagacgaagtagtgatcgaatgaacacatctgttcgaacaattcgagtaggcgcaccgtctttctttaccatgtttcgttgtaccaaggctgcatcgaagccctgtgctccagattcgctaaaataggctgacacaggctcttggaaagacttatgttgatacctctcccacgatttctgcgggggtatttgaccaggttcttcctgaagtaaatccaaagaccagatatcgttgttgtcgcctgatatgtctcttaaagaatcacatgttgtgtcagactcgctgtctatggagggattgatgctcgagtcggtaactgattctggtttctccaagccggttggaaagagatccagcttccatacagggtcgatcttgtcttcaggctgtgggtatatctcaaaacaagatgtagtatcacctataaataaatgagtgttattgaaggccctaaagtatctgcggttgagacttaccacttagagtagtgttccatggtaacgatcccaatggctgcagagcttctatgctgaatttggagagtctccagaggctttcactcgagaaaggatccagctcatgatcatagtccatagtgagaccatgctcagatgagcaagatgtttgacgcgtgaaagtcctaggtcccgcgacggagatggttatcgccgtgcacagaccgataacagaaagtgcctgctcgaagctcaataccacctatcccactacaattcagtcattcctacttcctgtgatcctcggatattgcatcgaagctacaatgcctccaaaaaagaagaccaagcgcgcgcactcgcctacaccgcaagaagataccgtggcggagtcaagcgcaaacaccccgtcaagcgacagcgccggcaagtcagacacggactacgacctcatcacagatccctggacagatgagcaagaaactgctctactcaaagcgatcataaaatggaagccagtcggtgagtttaattctcacctctgttgagtcgacagcgcagctaacggaccgggcccataggcatacacaagcattttcgcatgctcgcaatctcggattacttaaagagccaaggatacgcgccctctacggcggaacatatgcggattccagggatctggaagaagctaggctcattatacaatttggaagctcttgacgaacgggtaagcggcgaatgatggcttgttcgcgctggttcattttgctgattagagatatctttacaggaagattcggcgatcaccgatgtgaacgaagacgataaagggtcgagtgagatgtattgtgcatttgagctcccgtatgacgagtacggcgacatgatgtttgacaggcggcttgcgatggaagagtccctgtctcctgtcaccagtcgcgccagtcgtgcaggcggatcgcgacgaggaagcacagtcgcagatacagatggtaaggagtgacattatctacagcatgggctacaacccataaactgacttcttgcccggcacagaaccacgatcttctcctgtcccgtctcgaaaccgcaaaccacgtccctccacgcgtggaacgcgctcaactcggctgcaggtggaaataggcccagggagtcaaggcaaaatatcagatgaagggggtgattcggcagaagacactggtgcgaatgatgaggatgacgaggaaggcgaggatgggaatagcgaagaagatgagggtgagggcgaaaaaggtggttcacggagtacccgagcgcagacatctcgttccaaagccaaagataataggccttcgactggcactgcgacacgcaggactgcccgacggcgttaacatggccgagttttcgatgtgggttttgtcctttgataccaatggtgtttggatggcgttttcttttgctttatagatgtgtgtggccaagtaggcatcttgtaccctattgctatagtagcagaaccgatcaatctacgatatagatctaccaagatattatcaaaggaaattcgaggtttttcgggaatcaggcctccaggtaaaccaaaactcggtatatttcgatcgctataggtctaatgttgttcgaacggtacaaagggaatagatcagtgtgtcatagtacaaggagtgtccgcagcgcgtggtttacaggcgcttgatgatagccccagcatactcctgggtcttggccttacctccaaggtcaccggtgagggtctaaaggtcatggggtcagtaatgcgcggtatctgtaggaataaatgcaaaaactcaccttgccctcggcgagagtgtcgaagatagccttctggatgcggttagcgtggtcggagagacccatgtgctgcagcatcatgacactgctcagaagcatagcagtggggttggcgaggcccttgccggcaatatcgggggcggagccgtggacggcctcgaagatggagcactcgtcaccaatgttaccggagggggtgagaccgagaccaccgatcagaccggcgcacatgtcggacaaaatgtcaccgtacaggttgggcataacgaggaccttgtcgttgtagggggtagggtcagtgacgatacgcaggcatgtgttgtccagcagctcagcgtcgaactcgatgtcggggaattccttagcgatctcacgagcggtgttgaggaacagaccgtcggacatcttcatgatggtggccttgtggacaacgcggaccttcttcttgttgatggactgcgcgtactggaaggcaaaacggaggacacgctcggaagcctcgcgggtgatgagcttgatgctctgcacgacaccgtcgacgacaacgtgctcaataccggagtattcaccctcggtgttctcacggatgagaacggtgtcgacgttgtcgtatggggtcttgtagccagcaatggagcggcaaggacgcagattggcgaacaggttgaaagtacggcggagagtcaagttcagagagatgtgacccttgccaacgggggtctagaaaggcaaaggttagtatcataatccagatgcaagatatatatgggaaattggaagctagaacatacagcgagaggacccttgagggcgacgtagttacggcgcacactagcgacggcttcgtcgggaatggcggtcttgccatccttcaagatgggggtgacatcaacggattcccacttgatgggggcctgttattgacttagtatttcgatcacgttagagagttaacatgctcataccttggcagcctcgaagatgtccttaatggactgagagatctcaggaccaataccgtcaccctcaatcagagtaacaatgtatttgccctattagaaatagcagatcaattagcattgccgttgagaatatacgtggtgatgttctcgaattatggtcgctgtgcgctgcgcggctggcaccggcatagatggataaccgggctcggttggaaggaacatacatcaggacctttctgacccttaaacttggcaacagcctcctgtgcagggctggcgtagaaccgaatctattcaaaagctcgagagttagtcaattgagctctgaatagttagctactgagtgtcctgaggggttggtacctgcgcgataggagcagcaaatcggggtgtcacgcgggacgagcgcatgcactggcgagcgacagagaagtttctggtggcaatcatcttgatatattccctttagtttcttgggtagaagttaaagaggtggtgagaaagaatgaaggaaggagaagttgggaaggaatgaaatctctcggcgccgtaccgatccgaccggctctcagaccgcattggttgtttcatttcccctccggcccgagtccactcttttacctggtgctggtgtccactcttgacgaccagctatagggtctcagctgttgattagggttctgctatcagaggatatcagatcttggtcacctgcagaaaggcatagcccctggttctttttcgtatttcaattagtcctgactcctgcgcttcacccaccgggcaatcatggctgacctcgacgtcgcaagccactacaacctaccctccgagttccccgaggaatggccggcatctttagatgcagacgatgagccagaagaacagccagttcagcgagcagactctcgtccacgcaagtcccgatacatagctcttgaacgcagtaccagtgattggagaagcaactttggttcacgaagagggaaggaggggagagacaatgcacgggaagacgagcccgatcccttgggtacaagcgacagcgttctccggattcttaagcagcgaggagtgccattggaggaagaaggcaaatcacggttcctgctgtcatcgacatcattctcgccagcactattcctatcacaggctcatcactcggcctccattgaatcccttataagcggcctggataacctatcgcattccatcgaccagaagtcggcatcgctgaaggtactggtggaagccaactttgagcgtttcgtccgtgccaaggcaactatcgatagcgtctacaccgagatgagaaaccagggcgttgataaagaaccaagcctaagtcctcgcaggtcagggcatttccggagctattcaggtcagcaatggagcacatctctcgcccccgtggttgttgctaagaagaccgctcttgtcaaggagagtgagttcggcatgaagggtattagaggtccgctagttgaggcctctgtcaaggccgaagaggtttggggaccggctcttgggggtcgggaacgagagaaggttctgaagtcggtggtggagactatggagaagcaccgcgatgtctatgaaattggaagccacttggccaagtccatcaaacaacgtgattatgatgctgtctttgagcagtacacgaaagcaaggacactcgccaaccaggctaagaatatcgcggagcaggcgtccagttcccgtcggcaactaaacgactccgagacacataccattctggctatgggccggatggtgatggacgttgaccaacaaatccatggttttaagcgtgatctctggagacgtcttgccgatgcccccactacatcaactacaagcaccgcctcagggcctgtggaagaacacatggaattaatcggggccctgttggaattgggtgtcgaggaaaaccctatctggaaatggctccagagtcgttacgaattcctgaagacaaagatcaccggattcagtgatcgatgcaaggtcgaaatcgaaattttaagaagaagacttgctggtggagagagaccaacttcgcaggcgacagcatcctatctccgcctggcacctcgtgatggtgcggtagaattaccagcgatcctagatacggatcaagtcattgagctgtgggaatgcatacaaacgttcctaactcgacttctgtcctcgcaaagtggcttgctgggcgaggtcttggatttctgggaagtcgcacaatcattcattgatggcaatcgacaacggcttttgcctgtcggttttgaaggggagagtcgcaaacaccaccatctttccaacgacaatattaagcagttagagcagggtattgacgtgttggtcaatattattcgagaaaacgtcgtgacccttttcacggaacccccaaccgaagatatctccgtactcttctcgccagttccagcaagtccatcaactccagagtcgaggggtattactccgacagagtcccgcttcaagttggacccgaggaacctaccatatcctccgccaaagcttggagagcactgggagagttttgcattctggccaccattttctaattccctgagtggagtgcactatttgagtaaattcctcatcattgtgggcaccgctgcgagcgaaatggcagacctaaggccgattggcggctctggaaaaacatatgacctcctcaagacccttgtcagtattgcccgggaacgatgtgcacgtgtggcgtgtgctgcctggagcaaagatgcggaggtctgcaaaatgctggaagactggacacgcgattcagagaagcgtgatttgactaagatgcctgggttctttgtggcttttgagagtgctatcctggtgggcatgcaaaagattctttacatctcggaagctatggcaaagccgggttccgtggatgttgtcactcagccgcctgcgaaattgcttcaaatggtccgctctcagttcgtatcgagtgtttacaaatcattaagcggcttggtcgaaaacgcagagcgcctgacaacagtagatgaagaaaatgaatggattatttctcgaccagcaatgacaagccaagcgactgacgctgcattgtcggttctctcggctgattcggtcgattcttggaatcgcgtaagtatcggtccaatctgatgtgatacctgcataactgaccacagaacagaatgttcgaatccttctcacactctcaaatctgaaggctctgcaggccgactatgtcccacagcttatctcgaactttgagtcatccttctcggtcaagctgtcggaagaggccaagaccgttcgggacgtgctgagccagattgaagacaggctattccaatcatatatcaccccgactactgtcttattacacaaaacaattaccgctggcattgcatctccagattgggagccgtctgtagataggccggagcaagtccgcccatatgtctacaacgccctgctgatcatggtgctggtccatacagagatctccacaactattccgtccactgtgtcaccgggcgctagtcgcgctgcgtcaagctcaccttcctcgctcctagtcactgtgttgacacacctgctttctcaaatttcttcatcactgctggatgccttccgtgctcggccatccttctcactcccagctttgatgcaagctaccttggacaccgagttcattgcacagactcttagctcgtacataaccgacgaggcatcagatgtacaaagtcagatctacgtcgagctggattgtcgtaccacaaatgaagcccgcacaaaactgaaggccgaactaggagaaatgcgagttatcctaaaacggctcagggatcggacgaaggggcagtttgcttgcttcaaaaagccgagaagcggtggaggtgcaaatagcggagggacctccaagcctcccactgcggccgggacatactactaggtctagcaagacagtactattcaagaatcgtaatctgaataaaaacttttatttcatatccaaccgggtatcatggaaacatagtccacaccatgcatgtgtagttcgtgcctttcctctctaattctgaccaaccatccgctgcacgcgactaagcaacgcggtgctctctctgcctaatctcctcttcccaaactggtccggccgcttcgcgcgtagcagggccccacgctcgttttgtttcgcctcgcgttccttctgtcgtgcttcctcggctttcctcctcttctccgcaaactccaactcccttgtgaatgcagagggcttttgccggcgctccctttgtttgccctcgcctcgtggacgccattctggtttaggtgcaggtgctcgctccccctcgggctcgttcaacatggctatgcgatccgggtgaagttccagagttgttgcctcttcgccagcctcttccttgtccttgccagtttcgacttcgtccccctcggtggtatcgtacacggatttcctaggcgcgatggcgagttcttgggctttgatcttggcataggccttcttcactttggccttgtgaatcaagtcatttttgatcttttgggctgttttttatcgtgtggttagtctcattcaagacatggctttcgggcgtgctcactcttgcgacgatatgtgccatctgggaggtttgcaggtccaacgctaaagcccttgcgcttcttgatcgcgggctcgccctttgatactggggcagcatctccatcgtgggtgcgtttcggtgccatgctgatattcaagcaaagcaaatttgttttgtcttaacgtgtgttgagaatcgaagactttcggagaaggaaaaaaaaaatgtggcgatctccgcacggaacatcggtctcggccactagcaaggaagtatgaacttttgaacaatatacagcacctttgtcttctcggttttggggctaaaagatcgagattgtaggtaattagcattagcaatatcattagcaataccatctacaagctctacaacatgttcgacattatcagtgattctattgagctagtctacgcattatttacttttttctctctatttctccccaacatctcccatagcccaggcatcgggccttgatttccttattgagaccgaaataatacaaatatacaacattcaatatgactcctgaaggctccctatccaatcactgcaacacaacgtcactggtccatcacatgacgttcgcaggccggatctccgagatccacggcgggtgtccaccccattcaacgacacaaagcacacgacctgctcaatactttcttcgcctatcaacctgtgaggttcaaactgggcattcatactttgagacagcagcaaaagtcatgcccatggcgtgacgtattttcctctataaactgttatcttcttctcccaccagtaaaaaccaccgacagcatatacccgaatcatcctggtacaccgcatccaacttggaacccccaccacggcacagctcggctttggtttcaaaaaagtgctacgtgggtgtcttccggaaatgtcacatttagtattttatgtcttatagtctgcccttatcataccaccatgcccctatttcgagatccggatcggaggcgtcattatctatggtcgcccgaccatggcaatggtgaacaaccgaccacagggtcctcgcagctccagctaaatgatctcagtcacattgagggtgaggtagctgctccagaaatgacaaccaactctatgcattcaacggcgttgaatccgcctaagtcgtgggcgaatgatcgggaggagctcatccaccgtatcaaagaatcttcgccttggagacttcaacatatggtatgtgaatctcttcgtggatgcctagcactgttccaaatctctgctcgttgtgattccgctttctttatttgtccaacacatgcataagctaacatgcaaacagtccccggataaggacaacaaagatttatttatatctcaaacttcacgggagcagtcccaaagagcagcaagagagtatggaagccactctctcaacgaagaacgtcatgtcaatgcgacagaggaactgggatcgccggccgatatccagagacctcggtcagcgttacactccggtgatttcagggaaggtgccacagattctcatgactcacacgctccacggtctccctttactgaccggagcttggcttctccatttgctcatttgagctcctcgcccactactccttggttcggagcacaggcgttgccctccggtttacgaaagacaggtacatcgaatgaacaccttcagtccgatgttatcctggatgctcgcgctggtgcaccgtcggtgggctcattctcgtcaagttatgttctgaaagctcctaccagtcctctggtataccaagcgaataacaccgacttggacttttcgtcccgtgttgaccatgtggacgttttggaacatttagacagaaaaaaccgccgccgtactttgccaccagagaccttccgcaatctccaattctccttgccaagcaatcaaattctcaaccctaacggtccatctccacccaaacggcagcatgatgtcttcacaaatcaaacatctttgcctcgccggtcattgacttcatcgtatagtcttcaacttgcaccgacccccggggggcagatcccaccatcgcgagtaagacggccgtccttcgtctctgacatctcgtcaaaccatcacgcgccgatggtgggctcttacgaggaatcgatattacgcgggagaatgtcaatgaatccttccaagccgctagatttcacggctcagattggtgtcctaggcaaggggaattgcaaaggtcatctaaaatgtccgccacatgttacagtgccatttccggttgtcttctacagttatccgacctccgggtccggccgctcaatctcagatgacaatccaagtccctatgtgggacagattgacctggaaaattccctactaaaaggaaattccaatccgactagacgtcgcaggcgacatccaagtctgacggaacccctagaaggcattcccgccacaggtggagcaaatgatacccctgcatgtgctgaatcacgacgccaccgagaaaagaagaatcgcaggtcagaatcgcctaaatgtcccccgggggggtcttaccgcattccgcaacaaggtcaactacaaatcataatcaaaaacccgcacaaaaccgcggtaaagcttttcctagttccatacgacctcggtgatatggaaccaggcacaaagaccttcattcggcaacgcagctattcggcaggtccgattatcgatatgccgctcagtgcacggaaaaattatgggaccgatcgccctgaagcttccttgaatcccacagaagaccctcaggacaaacccacgttacgatacctcattcatctaaacatctgttgtcccgcgcgcggtcgcttttatctacattcgactattcgcgtggtatttgcaaaccgcgttccggacggcaaggagaaactacggaatgagatccaaaatcctgagcctcgatacagcccgtacaagccctcccgagagtcttccatctcgagcactgcgagcgcaaatacgcgcctgggaactgaacaagcgtctcgcagactgagtgtgggccagggagcgacccctcgtctacacccacatgtatcaagcgggttcccctcacagctagatgcgccaagacccgtggatgttacaggtggccctgaaaatgatgctccctcgcatagtgtgtctcggtacaacgagctcaccggaggcgacaagtcttacgaacgtcatgctcgtatctcgaatccgatcgtcccagaatctggcgagagccttcttgccaaaagactccgaggcctcgatgtgcacaggtcggagtccacagtagatgaacgacatccacgcaaattgggcctttatgatcgaccatctcctacccacagccaccatcctcgctgaacgaacccagcgctatatcctccaagaaatttgaccccgccattccgtataacaataacaccatctatctcccacgtatatcttgacctcgacttgacatatcacctcgtttcctgtctataccacccctcaaggaacagcatggcagtaggcgcactggtttgcagccgatcccctgtttatactaactcacatcatagttccgagtatctttattcaccttgattcatgcccgagcgatgtgtgtatttattttctttgccacttcgaagtccagttgatctgctttcattgcctgtgcttcatggatatattagggagcccgggtgcatgcatgggtcgttgactatacccttttctattttggtatcttattctctttctgcttttggccttgacacttaagtttatctgttagatggttaagttggtgatttttagtattgattacatatatctcgctagtgcactgcgtcgctgcgcgattttgactttcgtgtctgccaataggatatatatatagaagttttcagatgaaagaatattcattgatggaatacagaagaagtaagatattgtgaaatgtcagagaaggcgagtttgagttcctgcaatttatatctacagcgctagatacagcaactaaattatccaaaatgacaagtgtcaagccacccaggaagaagaccaagtgatctcgacccagccgacatgatgtattacgattcctttgagtctaagaaaagaaaatttcctagtcctcttcgactaatgaacctagcttaaccagcatgctccacgatctcgctcaccagcacgccgtccttgaggtagctcttgaactgctctggcagagggcactccttggtatcttcatcggtgccctccggcggcggaagggtgatgttaatagcggaacatttgctagtaaagatctcagtgttgagactctcttggctaaggtaaacggtagcaccatcaacctgatccatcagcaaagtggggaccgtgccgtcgatctgcacagcgaacttggggcacttgatgatatcaagactgctgacgagagagtcgacgataagggagagaccaacgcagttgtcgatggcaatagcgttagctttgttagagaccttgatgatggttttgttgcagcgactgatgaggatggactggttctgttgcgcagagacctcgatgatctcgccaggggcatcaaaattctcgatgagccacttgctgccctcgagttccctgcggggcggcttgcgcgcgcgcatgttttcgggcttcggttttttgctgggtgctggggacttgccccgcacggaactgccctcagggacgatggatccggcgcgcaggttggggttcttgtgcgtcatctccgatttgtcgaccttgcggaggctagaggtgataccctcgccctggttgagttggtcgaagacagcgcccatgtctgctgctggtgccgcaggggccggagcaggaggaataccaggaggcggaggtgggggaggagcgccgccaccggggaagttgagggatgggacagggggaggagggggagggggaggaagggcaccgccactgaccgcagcaggtccggccttgacctgcctcaaagcttccatggcatcaatgcccgtctcattgttccatgtcagacccttggggtagtgtttcttgaggtactccgcaagagccttgaagttttgatagtaggctttgatatattcgacgtgtacctggtccctgttaaattgtcaacatggtaattcccccaaagcgtcattaacaggagtgctcacttgtccttgtactccttcagaaccttatttccgtagtattcaatgccaccgatcatgtccgtgacaaactccgcaggcttgctttcgaagaaccaagcgagcgcaacaataccctccgcaacagcgcttaggtggttgaatagcggcgaggctctgtttgattcgcgaatgttgttaatgctatcggatgctttgtgcagatctgtcattaactccggaggctgagtatcgggtttcttggcttttgtaacaacataaagataggtacgttcagcttggaaggcccgaaggacagctttggactatagatccagtcagcaactactcgcggtagactaagttcgcacaattcctcaacatacttgctcagcaaccagaccgccgatcttctctcctaggttgacaaatttctgaacatcacccttgatcaacgcatcgaagtcctcaatctgcggcgggacgggggcggccacaggggcagcgggcggaggaggggacggcttagggggttgtggaatagcgggcgtagaagaaggtgaaccggtcaaagactttggcgcgctagagtcatcgtatgacatcgccatatcctccaagcgtgaggtcgctgcctcgagcctgcagatgagttcgatgtcagtcaagtgtgccggacgtaggtgtcaaacagcgtagcgggaattgagctaagagcaaaataccagtgaaatgccattggctagacactgttcgcaccaaggatacataccgcttgatgagggtggtgaaattatgcatatggccgccggacgccatgataggcaacacgttgcttcaacggaggaagcggaaaggtaaaaggggtgatttgagtaggttgagatccagggattgtcgagaagtaagatcccctgctatttggtaaaatgtaggcctttgagttctaaaaatcgacacacgggatgatagggagtggaaagaagacgaaggttggagctcctgaggcccgcagatgacggctctagatgtggtatggtacgttacagcgggatccgcaggggaaatgacgttgtgggggtatatttggtaattgaattaccgttcgatccaccctgcgataagtcgaaaccccccatgttcggctgttctttgtctttcttgacaatcagcttctttgtcgtatttatacatacaaagaggaaggccttagctgcaaatatggtggcccaagataagcccgttgaggtcgagttctgcaccttgggaatgttcataattggtatggtttacttcgtcgctcaaagtgggatgtagactcacaggtgcattgttattcagatgatattgatttcggcggctcaagacccagtgttaagaatatcctcggtggtgcagcatcatttgcagtcgtgggtgcccgcttggtctcaggctcgaagtatgcacgagctgtgagctggatcgtggatgttggctccgatttccctacggagacgcttgatgtaatcaagtcatggaatacagcctgcgtttttagaaaagaccccagcaggctaacaacgagagcctggaatgggtatcatcctgacgagaaacgaggtaagtttgcggtgatacatattccaccgaggaaacccacgcggtaactgactgggaagacttcaaatacttgactccgaaactaagactcgagcctgaaatgttgtccgattcacaggtgtggtccaagacattccatatggtctgttctgcatcccgttgtatgtccatagtgcacgatattctgcagcggagagatgaattgcaaaagacagggaaagcaccgtctgtcgctcatgcttcccagcgtcctatctttgtctgggagccagtccctgatctctgcactccggaagaacaggaaaagttcttcgccgcaaataaagtcgtggatgtggtgagtcctaaccacatggagctcggcatgatgtttggccagcccggttggacccaaaagagccaagcaggccaggaaatagtccaaaggattacagaatccggcattggccccgatggaaatggcatgctagttatcagggcaggaaaggatggtagctacgcctactcaaagtccggcaagatttggctccccgcatatcatcaacccagtgcttcaggtgctacgcctgtggtcgaccccaccggtgcgggcaactctttcctcggggctctatcccagggcatggtgactgcaggccgagagccattccaagtcattggctctgttctatcaaactccgaaacttggaaagcccttgagtcttggggtaattacaagcattatcctatggcgctcatttgcgcaactgttgcagctggcttcgtggtcgagcaaatcggagtgccacagatcgatattgatggaaatggaaaggaattgtggaatcggactgaattcacggaacgtgtccgcctgtacacgcagcgattatcgaggacatctgaagagtctctctgagaactattagtcaatcgactaatttccgaacgagaaacgctcttgtattgtcgtacagcacacaagtgatcaaatagtagaaaaacataaaagaaaaggttcctgctgaaaatccgcctacaaccgccatccagtatgctggaccttctttatgagtcgttcttcgcggcttgttgtttctcgtgttcccgaatttgcctgctccagctacaagtgaagaaaggtaaaggtcagcatgatatataccgagtgacatgggttcggggaacggactatcggctggggaagaagcggccgggctctggcatcttgtcgcgatgttcccgatcagcgctgatactgaaggcgatagcagcgataccaaacacaaagacgcccatgatcgcagtgttggccctccagttagctggctgggcataccaaccaccagcgggggaccaaacttccttggggtacctgccagatcgaatccattagctcctggtgaggttatgaaaaacacgagcacatacgggatctttccacctccacccattgtgacgaatatgcaattgaagggtttgttagaagattaagagagcgtaagcctggtagttctcgaaggtgaagccgaaagggccgtctcggtcgcaggtctgatgccaaggcgctatgtctatattaggcttagcgccgcctcacacgacttggccatcccgtgactgccgcgacaatttctcttctctctcgttgatggtatgccaattgattgcgtcgcgattatccctcccgtccattgtataatcttttttacgccctcggaataccacaatcgcccaaatgaagagactgcaactccaaagatggagcagttcagtcctttcgccgcgggctcggactgccaaccgtctgcatcaacacatctacgggcaacggtatcaatcgaccgctcccccggtccaaacccgtgatgatccgaccatacagattttcgaggaaccagcagttttggatgagcaattggctcaaattgtgaaggactctcacacccgccactcgcagctccaatatccttctcccccagtcgaagcagctcgacaatctgcaaaactcgccgctctccacgctcgactctacctaccctccagattacccgtcgagacacttgcgcggacactagtcgatgcatcagcagatccgaacccgaatttcaacaatgcctcgctggccactctcggtcacgacctcctttcctactacgcaaccgagcaccttatttgcacctaccctcgcctacccttgaccgtgatctttgccgccatgtatgcatacgctgggcctaagactcttgccgcgatggcacgagaatggggtgttgacttggccgcgttgcccggtggtgaggtcgatcccggtctgttgcagttccagaggcttgagcctggcaccgaacttgcctcaggcccaaaccacccgacagcacggccatatgaagcacagaagaattggaggaaaacggtcacttctaagattttctatgatgatgaatttggtgacccgctcaaggggatcaagcaatctgccgccggtgtcaccaccgagcaagcgagcgctgagttcgtccgagctgttatgggcgccatctatctgcatgccggccgcgccgctgccaagcgattcttcgagcaacacttcctttcacgacacctcaacatctcagaattgttcaacttccaggcaccagcccgtgacttgacccggttgtgcgctcgtgagagcttcgagcgtccagttgccaaggtcatcagtgagactggtcgtaagagcagacaccctgtctttgtggttggtatcttctctggtcaggacaagcttggggagggcgctggcgccagtctgatggagggccgcgagcgtgctgctgttgccgccctcaagggttggtacctttacagcccactttctgtgcgcgttcccagtgcgatggaggagccatcggccgcaccgtggaagccggtccacgttgacctgggcgaggtcattgtttaaggtatttgttggtgcaatgggatgccttggttcaaggcacggtaacatattatttcatgtccctttttttctcatctcgcttttctttttccggtgtgctattctttcgcatgggaagctagccggcggtaaaaagagtcatctatcctgtctcctgcatgactggatcctgtacattatgggaattccaatcccttcgattcacctggtgtctttttctgctaaatttcccttattgttttttttaacctctgttctactcttctccagttagacatccggaaaaactaggcatgtcatggccctcgctttggccctgccatccaaatatagaactgctctcagacatctattgaatgcatgaaaaaatcaatgttaatggaagctctcttgtcttttgattctgttagttctatatctctagttactaccaaatgaatctaccgatgcctacatatctattcatctagactttacatccacccatcattccgggttgagaatctcatcctcccagttcccactactcctcccgacacacacctctgtaggatcatccagataacgcccatactcttcccacaactccccaaccctaaccccgaaaagacccttccagaacccgataccctgattgtctgcatcctccccttcaccaacatacccaactctcaaaagccgatcattcaacatccccacagcgcccctcccaaccctaacatcctcgagccacgccagaaaatacgctgtatgctgataccccatgtcccacttcggcggccgttcagcagcagatagaggccgtttccagtgcggcggctccagaccagccttgagccgcacaaagtcagctatgccctcgattagtccgcccggcggacgggggatgtcctcgccgttattcttgagggagctaggcggcgcggtgtgctggtagcaatgcacaagctcatgggtcaagactccgaccagctcgtggagcgggtcttctttcgcagatgggccggatgtacagtgctggatgtacgggagcgagacgtggatttccttgtgcgcatcgtcgagctcggtgcctgttgtgtaggctacgccactgtaatcgcggaggaagactgttacggatcttgttggcgggatgctgggtgtgaaaatgggccggtgggggttctcggactttgggggtgaagtatataggtgtttgatgatgttcgctagggctctgtcgagtgttgatgcgaggtctgggatgaaggcgaggaaggcgcttgaggcgggatggcgtaggtcctccacgtgaagacggagcttcggttgggggactggtaaggtgaggttggttgttaattttgtctgcttttctcctttgctgctcgaggtctgtggctcttgctcttgggtgttgcccttggggattgcggaggcatgaggtgcgtgggcggagctcgtcatgatgtatttgctttgattgacagcgatcaactgggcagatatttcgtgttaaagatcttcgactttttatatttgtctgaggtgtaactatggaagtttaggttgagggcggggggattcaacgttataatgactagacccgcccaggtctagggcctaaggcaggatccatgagttcatatacctatatgcacatcgatatctgataatcgtatgtataagccagctaaacctttgaaggcgcttacctacatatataacgtacagagataaacctaaatactttaggctagcactctcaaatacacaccttgtcggcgctggtgattctcaagaggccgccatgctccactttggcgatctcgtggggtgctaggagctttgattcacattgattggaatgaaagaggtgtatggagtaagattcaatcgatcgcgtgtcagttgagcctcatattgatctttatcgtgttagacaatgcagtgagaagcttgtagttgtttactatggcttgaattaccatttttatgcctttttttcagaaaataggcaaattggtgattcaagatcttttactgagcaaataatcggtttactggtgagcatttgacatagagatgttgtaaacatgacgctattggttgcctattgcgacgagtgatcctaagttaataaacaaaccagtgttgggctcttaatagaaccttcgggcacacctcaccatgtaatggcggctggatagaattagacaggtataaacctaggcaggtacttctgaggaagtaacaacccccaataaaagttgaaggactcaagggccacccctttaatatcatctacatccctcgcgcttatcgtcacgcgcttatcgccccttgttttcactttgtccacttttcaacatcccaccatatcgaggtcaactttgcgctcttcctcatattcgtcttctatctcatcggatcctgtatgttattatcctccctgctctgttttgaacccttcatggtcctcttcgccattcctcccttcccgacatcccacacccttttgcgacagatcccgattcccatcctataaccatctgataccctcactctgtacacacgtccacgctatcctttcgcaatcgcaattgccctgcttcttatagccattgctctcttctactggtagaatctgctgctaactttcgtcatcgctagtgacaaatcgaaatccgagtctgttctcctatccgctattgaccttatcgcattttgattctcctggatcgtccattgcatacacccgcattcttccgtctattcccttcggtgcctgccgcgagttgagatcgatatctcggtgtttacaatggaggcgaaggcagcagaactactagcggccttcaagaaccccaacctgtccgttgattcaaagatcgcctacctctctagtgtcaagtccgatatcaaacagaaaaatgttccagagggggcgattcgcgccattttcgaaacactacgcctcgcgatcggctcccaacattattctgttctcggggcggggttctccacactcggtcacctcctgaagcgccttgcaatccaagaccagcagcaatggattgttcaccaggccgagagcttgtatcccattcttctagagcgtctcaatgacccgaaagaacgtataagagcccaggctgcgtcaatatttaccgaattgtggccatttgcgggtgacgaagtcgaatatcatgttctggaaggtgccctggttggaaaaaatcatcgggcgaaagaaatgagcatgctttggttggcaaatgtaggcttatgcaccctgcaaggtctgtctcaggtactaattccgatctacagatgacgaagaaccatggtttgttgttccgtcaatatgttccttccctggtttcgtgtttagaggacgccgatagcgccgttcgagatacggccaagttggtcgtgattgatctgttccggtgagtgaagttatcactctaatcattattcacgaatgcccctaaccgaactcagaaacggccccgcaagagcgaagtctgacctacaaaaacaaatggcgacacgcggtgtgaggaaatcaatcgcgaatgctatcctctcaggtattggcttaggatctgttgaacccgagactgcatcctctacgcgtccaatatctcgggctgaacgctcgatttcggtgatgtcgtcacgttcacatactatggaacagactgatgatggttagtattctgattatatttgtacccttggagatttgcactggttgtactaacatgcctgcagagatggagcctgtgaaaagccgcccagcttctagagctcatcgtgagcgaccggcagcctccgcatctacagagccaccaattgttaacagaccccgcacgccggctccgacaccagcacctcaggaaccgttgccaggcgatgatggtctagaaccgtttgatgttgcctcagcgagggatgtcgatgatcttgtgcgcgatatgttgccctggttcgaaggcaaagaatccgaggacaattggtcaaagcgcgagaagaatgtgattcttttccgcagactcactcgaggcaacgcgccgcacgacttctcgcagacctatatcagtgcagtaaagacactccttgacggtatcctaaaggttgtcaactccctaagaaccacaatgtctagcaacggcagtcttttgatccaagatattgcccgaacatgtggccctagaattgacccaatggttgagattatcatgcaaaacctgttgaagctctgctcggcgttgaaaaagattgctgctcaaaacggaaatgtcactgttgaagtcgtcattaaaaatgtttcatttagcgttcgcctcctgcagcatgtctgttccgcaacccaggataaaaatgttggagtgcgtttgttcgccacagggtggctaaaagctttgatcatccgccaggctcatcataaaagctcagttgaacataatggtggccttgatcttatcgagaagtcgatcacaaaaggactgggagatgcgaaccccggtgtgcgcgaagcaacacgggccacattctggacgttctacggtgtgtggccggagcgagccaatgtgatagcagacacactcgaccccaagtcgcggaacttgctggagaaagattcatcgaaccccaacccatcttcaagaggtgcacctgcattacctacaaagagccccgctaagagtcgcgccgctttaaaagaagctattgctgctcggaagaaggcacagactccttctcaacccgagttggctcagccaacctttgccgaggcgaagccacctgctcctaccttcaggtctactcggagtgtgcctactggggcccctctctcatctctatcttccgcgcctatgaggcctgccgtgaagcctcggcgggcagagattagtcgacctgcaaccgcagacccctacgctcgtcgccccgagtcacgagcccagtctagtaaccaatctacccgacaagcgacaacttcccccagggctatgaggtccaaaccgtcaacacctacgtcaagggcccctctaaacgcgcctcgcactcggccaaatgaatcggcacaagctgctacaactaatggcaggccgaagagactcgatttgtccaagtccaagtcgcacagcgatctcatggccgcgagtcgtgctcgcagtgactcgaatgaaagtctggccaatcagccatctgcaagaacaccccgtaatggaatttaccccagtgcacccgaggacaaacattcccctgcatctatcctattggaaagtcctccgcttgatgcaccacagcctcttctgtactcagcaccgcatggtcctcacgccgactcggttcctgttgaagaaccagaaccaatgacactggaggaacctgttattgccgcaccttcaccttatatcccggaaccagatcttgcagggtctcctgtgcccgtgtctccggctcagcattcagatctggattttggttctggtcccgtatctgccgtcaaacccctgcatgaatcaatggtgatttacgaagatcctacaacgcccatcgcggacaaaaatgagactcctgggtactctgcctcggtgggcaattttaccccctcaaagtcctcccccagtcgcgctgatcaatccgaacatggcggagcagaagctcaacttgtctctgaaaatatctcagcatcggtggtcgcttccgctaggaaacccacacctaatttggctcctacgcaggaatctgttatgaacttagaagctcgaactccctctccaacccgccgggcgccacttcaaccaagcccgtcacctacgaggggccgtgcccagccactggcctctaatatcatggatattgaggccgtgcttccccaagagcatcatgcaggaacgaacgaggccggtggcaacaatgagaatgcgactccacacctggccaagactgtagacttgcccgctgtcccgcggtctccagctaagccgagtgtcctcgaagaagtgacggcaaacgaagctacaccgcgttcgccagaagcgagacagaggtcatttgagtcgataccaccatcactctcccagtcgacgttgtcccaatcatcaatgtctgaagattccacacgacgcactcgaaaatgggtagatcgtcaccgcagccctagcccgcgttcgaaggacccggctaatgcccaagaaatgatccataaaggcctggcacgtattgtgtcgagaaccatggagccctcgggatataggaaactacagggacttatccaataccacggcgatgagattgtttcccaaagccaggactacaatacgttgctggaggctctatttgtggaactggaagcgacgccttccaaccgcaaggatcatgacgtaaaaactcaggttttggccactattcgttccatgctcctacgaacccgcgaacatttccacccctatgacactcgtgctatggcagctattatcagggcccgctgccactacgagtccacttcccactttgtcacttgcttagaagaagttgtagacaaactggtgtttttaactttgccccagacggcaattgtcggtgttctgcagggactagatcttggagcagatgcagagaatgatgagacataccgttccaccatcatgggcctcagtactattcaacagtcgctatcgcgtcccggtatcgatatcgacgacgagcttctggctcgcattggagctgtggtgatgcaacagctcgggcacccgcgccctggggtcagaaagaatgccactgagctctgcacattcttgaacattacattcgggcccgagcgagtgcaaaaagtcactcaacctcctcgtgaaggatcccttaatcttttgacatacttcatggcccggcgaacccagtaattgttctttttttttccccatcagctcaggatcctcttaggaggaccagcgattagtctgaatatcatcatacccatatcaggcacatctcacattcttcactcgtatccatatcgtactaggaaacccctcaggggattgtcctaacaggagcgaagctcagccctgggcagttagaaattggattttaagaggggatccatgagtgaatgggatcatgaagtaatgagatatatagggaagagaagagaggaactagccacctgaaactatacaagagaaaaggaaaaatgaggcatgtgacctcatctgcacactgacattggcgtgcgttgtgcaagtcggatttggtacacgctttgcttcatcagctgtaggtggtatagttccagtggtttggcttttccacgccatcatacaatacccctagctagcttttgacttcttccccgactttgtctttgggcatatctgttttgggatgcgtcttggtctggcgagtggattgttgaatcaacgctatgtaactacaaaaggtaagaaaatatttctgcggtccagaacagtgactaatagggatattcctcgaatctaaaattccaaagagttttcgccgagtcatcgaacccatatcctttggaactggtagctccaatatgctgcagtaaggacgggatcactgcccagcgcgtccagccctcacgatccgctatcttctccaccatcatgtctaccagccaatcggtcgtcaggtccgtctgctcaaggaactcaggtatgatggaacgaggaaagacgaggccctgcgagcagcacccatatttgttcatttcatggacgccacgggttatgggccacattgtctgtcttcccgccataaaatggagcgcaatggcagcggggatgaaaatgcaggatgtgatcaaaatagcgttggttggaatagtcttcagtttggtcctgaatactgttttggaggcaaccatcgtgcccgtaagcagagcccagaccatgaacgaccaggccaggtatgccggccactcttctgaattccatccaagaagctcatcgacataaaagagtcgcatatatatccatttcttattcatgttccgttcttccacaacttcgagagcctgtaaagcggacgagccagcccttcaccgccagagtatcatcttcaatcatcgccacgtaatcagcgccagtgtcgtaacagtctttcaacaaatgagtatagtcgtaaatcgttttgtttcgataccatccaccttcctcccagtcttttatacgctcaaaatctggatcatcttctttgtacgtcagcaagcggtctggcaacgtgctaagccacttctctgagtaaatcggatgttttgacggatctgtgttaccgatgagaatgttcagataaatgctcttcctctctgttttgctaagaccggccaggagagaggccactgttaagcccgtatattgctctctacgagagcgacagttgctattccaagacatatagtaggggtccagttgtgcggtcttattggtttattgatgctaccagtatctctttgaaactcctctgcctcctcgattctgatggacgaatatcgccgctcgtaggcacgagaggggtcgaaaaaataagaggtgggatctcgatggctggcgtaatgatagtagtagaggcagaggacgtaaaggaaggaccaagtgcaaaatatgaggttggtaatcgcaagatgaaatctcctggggcacacaagatgcgacgatcagccattctcgcttgcagtccgttgggtgaaaattatatgagggaggtgttggtgacgaggaataggggtaactgggtgtaccaggcgcaacaccccagtatcaaggactagcaattattggacatatgtcaagtgatagatgggcgattagagattaggttgaggggtagatgtctgaccatctcgaactgggtggtgttcacctgcgactgggggtctatgcccttcggggtatcgtaaatccttctctccccgtatactcgtatccgcttcctacggcggctagaaattgattgtgattggttaagaatgataagctatatactgtaggttgagtttatcggaatgccctcgccctatacagcatatacatcattagccctccagggcggctacacggcagccccacatgggattctctcaaatatacggacttaggcaaagatgcagattgcatgcgttagggtgtttctgattattttctgaaggactacagcgctatggtagcttggttggttaggcaaacacgctgtcggccattgcagatccccaaagcccgggtaatgacagttctattactccgtactccctatagcatggacaataacagcaggtttgagatggtataatttctttacggtcatttttaccgtcttggtctcaccttctcagccctggagactttgattcttatcataggcccagcccctgtctgaaaattcagtcgcagcgttcctagtttggacagtacctgccttgacatagaggtccaatcgcaccttccccagggtcagttatatgcctaatgtataccttccaccttctcgccggatgtttcctccttctgtatttatactttgagtcggttaaagtagaaagagcatcgaaaacccgaggatccctacagtcctagtccctgtcagagcagaaccagtattctctgtttctacagcccaccagcatataaacaaggctggtaggagatacaaagcttctttgcgtgcccattttcacaacttctgcgttacaaacaaagaagcaggcaacagtctcctctacaagggtattgtgatctgctaatcggaattcaatttctgatagacacaaagataacaaagaggtctttgaaatcaaatacagtattggtatgcaaagagccagagtgaatagtctatccggactataaatcgccctctttgcctcgaagttggtatctcatcagcattattttcgagtacccaactcgataattattctctaaccaaacagtgaaataccagcttacatcatgaaattttggaaatgcgtcaaaactccaaagcagccgcctcaaagattcccactcgaggtagcggaagccttcaaacccgaggaagagatcatccgtcgattgaatcgtaccggctcttccccaggaaatctcctttgtttattcccggaccctacacctagaacaagtcttaaccagttccgtttccagctgcaccgagaaaacggggttctacccggcctcgtcggttacctcgagaagtatagcagcgcctcgcacttggtctggagtatgtgtgctcttcttgcagatagcggtatcgatccagactggacagatgcatttgagatgtggcggccacagtggagacagttcgctaacagttttgaaatgcagggaaatatctcgcgtgctttagacattccaccctcaccagtccgtgtaatgtgcgttcgaaaacctcacagccttgatatgtataagctctatgccgttaaccccaaggcgaagaagcgtgatcaagagggtctggaggatctctggaggtggatgcttgatgcaccacccgaggtgattcttcagggagctttttccattaagcttgaggttgagccttgtttccctggcgaggagatatcgtttgctgtctctagtagctggtatgagtaagtttactgcttcgctgcaccatccctttctcttctctatatttcgcgatccaagagccgctcagtggtattaaatagaccaaaaataaatttcaattacttcctggtctgaagtctgaactgtatatataggcttgaggcacaatattacggagtagagacatggaggttcgtcggattaccggatttaacggaatatgtattccgggtaaaatgaggggtgacgatcaggtgacgaaccccatactatataatcaattccagtttccagcttgaaagagtcataacacaacacaatatacatcctttcttgcaatcttccgcggtagatataaacatcatgtctgacctacccaaggttcgttggggtatcattggtatgtctgtatttattcccaatggctctaagtgtcgtggtaagctaacgttttccataagctaccggcctgatctcatcgtggtttgtggaggatctggttttcgactggccagaaaagaaagttgagcatgttgtccaagcaattggcagttccaatcttgaaaaaggccaagcatttgcgaaaaaacactgcccgaaacaaagcccaagcgtctatagctcttatgaagaggtctatcgcgatgcagacgttgatattgtttatataggaaccccacatggggttcattatcgggattgcatggcggcgatttccgcagggaagaatatcctgtgcgaaaaagctttcacactgaatgccaaacaatcgcaggaggtattcaatgccgctcgtgagaagaatgtatatgtggcagaagcaatgtggctccgacaccgaccgcttttcaccgaacttcggcgcttgctccatgaagagaagatcattggtgatgtgttccgggtgttcgcggattttgcgttgggtattgatgttgccacacgtccgtccacatcccgatatcgcgacctgaatttgggagcggggtcattgctagatatcggagtgtattcgcttacttggacgagaatggcactgactggaaatgggtctgatcagtcagagaagccgcggattgtggccgcgcagagccatgaagcaggaattgaagagacaaccagtgccatcttgcagtatccctcgactggaaggcagggtatcgttacttcaaccaccaaagcccccggaagtcccggtcaagtctttgcggttatacacgggaccaatgggtacgtcgaggtcgagggtaggatgccatctgcgccggaatcctttactgtgtggaagaggcctcaagggaatcccgaccatgcgcttttcccgagggaacagtgtcaagggaagaaatacgactttccgcccctggggcgtggctttgtctatgaggctgaacatacggcacttgatatcctcgaaggccggaaagagagcaggactatgccgtgggcggagacaatttatatgatggagatcatggacgagatacgacgacagggtaacacagtctatcctggagagtgatggggctctagatatgtatctttgttctaagggtatcaaaaaatatcaccggaaaatacatctaaaagcaatctgtaattgtagatctatatggatggcagcagcagtaatatgaaaggcacactggtaaagatttacgtatgaaactgccccgctctaaggttaaccttgagtggatcccggcagtcgtccacccaggtggatcctatgcaacccggaagtctggtggtaatctactccgtacaattgatgatattccatatgccactgcgctgtacgtaaaatgatagggcgttttggggcgattgagcgttcttcctcgaaaatattcaaatggcggtgagcgaagcgaggcccttccaacaatctgctctcattgttagaaggttctcatttttctttcgtacattatctgctagttccgttgaccctcctaacctccttcaccaatatgacgaaatatgttgtttacggccttgagagcgcaatcaatgctttctttagctcgagtaccactacaacgagacagcaatgcgatgacttcgccatcgctcgtgctggtggtgtctctactcctttacagatgcaaggagtgtgcagttatacagtgacagcgggacccgacaagtccaggatcttccagtttcgatgcgaggactctacgattgatattggtaatatcagtcttgccaaggcagtccatcccgagttcattgccagctgcaagtatctcgggaccttcggcaatttacagccactccatatctacgagatggagaacctgtctggaatcactcatatcatagcgcgcattccaccaggcgacatgtcccgacaaagtaataccatcaaagaccttgctaggtatgtctaggaaatttgtggcctcgttgacaaaagctgacattatcgaataggttctttgcacagtcgtggaacaacgatcgacgaccatactcagatgacaccgctatcttacttaaggagtttcagtctaattttgaccttcttgctcaagacctgccgtcccgctttgcaccgaacttagatatggttcgtaaggagctcccgttactcttctcaggagcgctcccatttgttctcagccaccaggatcttaacatgatgaacctccttatcgatccagaaactggaaatatgacagggattgtcgattgggcggaatctagaattctaccgttcggtttcgcgctttacgggcttgataatattttgggcctgatgggttcaacggggtggcactactatgataaccaccgcaagttcgagaacctcttctggaaaacctttcgagaagaagctaatgatttctccgatgctgatttgcgtttgacccgcgttgcgagaatggccgggcttttttaccattatggattcttatttgacattaaaggtacggtggaaagtgtgcggatggaccaggctgatggttccctcgcatatctcgatgctttctgtacttcttgttatgaaggcagacagcgtgggtgacaaggtgtctgtttctattatattgaaattatactgcgaacatatacattggtagtcggtcaattaagtagatatatcacactagaaagaaatgattatagtactatagggatgcaaaggaccagatacctggtttctaggcgcagctcctgtactctgattccccgcttcgtacccgcgtcgtgtcacttggcaagggccgggtattgtcggtgggacctgtatcctccatttcgcataggagtcaagtgtctcttcactataaaccatacagagtttttgtcatttttactttcaccggctactcatgtatagatgaatcttcatcttctgtccttaggcaagaaatagaagtatggagaatgatacataattctagaaactgttacggatagaaatgaagcatagaagagagagcggaggcaacgacacggttgatctgtttgcctcgagttacacaaatgcaattttctcatctgaaacattttggaccatgaaagaacatacgagtagaaatttaatttgcaaccataaaccgagagctccaatcaccgtgtaggaaatagactttccatgctgttggattcgctgaaccgttcccagccagttgatgtattcgtagcccgaatccagtagcacccagacccattcttcgtcacgacagccacaggcgctattgtgatgttccatgtgtttacaatcatagggctgacaaatatgactgacgctctttgcccatgaagactagcaccggagaaatcaaggcccgtataatcgaatgttgtccagtgggataccacagcaaagcctagatttacagtgccacgtagcgctaaggtgaaagtcttggatgtgtgatcttcggagaatcgaaggctctgctggacagatatcggagatgtatattgcagtgttgcgaggcgtatatctcgtgcaatctcggcaaccgattcttttttcagctgctgagtagagaatttacaccgaagagcgccaacactacaacgaatgtagtatgtcccggccttcgggggttcaagaaagcggcgaaagtttataatcccaaagtagtccactggattgggcgatatagctgaaggttgaggggaatagacggatttaagataccatgcagcgataacatcatttcgtgtaagttgaatctcggaggaacaatctttcagctcagtctgtgatttcatccgcaattcgtcgacccatgcgcctggaatgtagataaacttggttgtgaactcctcaagtagcccaaacttcatagcaaggatagtcagcagcacatgccaaacagtcattgctagtttaaatatcccactgtcataattttgcgcatgtgtctggtagtggaaattggactccgtttcggtgcactcagttttgacttttatcagatcagacattcggacattcccggcatcaggtggaagagcaaacaaagggattggcctattagacaataggtcagaaaatgctttaaccacttcccaacaatcattgccgtcacatatatggtgcgttattccaaaacagagcaaagtagcatctcgtagaagagtaacacgaagccggaaattgtttgtgcggctagtagagacattgaatatgaatttgtcatcaactgaagatatttccgggcttttcatgatgtttggctcattgctatactggtcgtggtggattggaagataggtagccagtgattcatcaatagccctgctagcgaaatcgacagtagaaccacaggtgaaggaccatggctttgtctataaaatgatatgagcaggctgtagtagcggtaagataaactcactcacatccttgattagatcaccgccaagtattggccataatccaactaactcggtgagtttccccttcagaatagccgaatcgagaaccgcatcgacaatcaagcccgtatagatggtacttagatttcctaaagagctaacactgttgcaagtgtatttcgtagagcccaattttggaccctccatttttaggttgagagagactgagatggggtgagattctttcgtatatgaattattgagagagttctctcggggatttgatagaaaatgcgagtacttttgtactcctgtacccttttcttcactgtttattacgagtaacctcggggcaaatagagattatcttctagatatgaactgtaggacatatgtagtactaacatttatttgcttttttcctttgtttccccttttcgtctttgctgctattttactcgatcattaaacatcgtaattttttcaagcacatacagcgaatgtaataatacattggaacggggacaagtctcgtggaggttgaatagactcctcgtccttgactcaattggcgattacaatctctttgctactgtctggaagtctgcatatggtcctgaacagggcctagggcaatatttcttacggcagcggcgtttacctcactacaaccggcttcacaatgaatatcaacaggtggatcgtccgctttggaagattgaaagagatgaaaaggattactttcgaaaggacttcagaaacacaatagctaagaagctgacgcttgtgtcagaatggaagacccagtatacgcacaatgatctactcagacttcggaaagatatgtttatcgcttctcccaaaatgtggaagtggatccaacaattcatacaggactgggaagagatgccttgatctgctccaaaaatcagaattcatttttccttcatttttttcatgatatctactctacgaagtttacggatacaaatcagccattcatggtccatggcatgaaaagcacgaagccaacagccagatggatcgtattccaactccaattctggctagtggtaggatgtatataaaccgaaaacaaacatcgtgggagagctggggcattccatggttgcatggatatgtggagaccccgggtccactaatatacttcccgccgggcagtgaccaatcacattgtaactaaatgacccacactgtccgacctcaaatgtagacgacttcgaaggaaaacaaatatgtgcttctctttgattgagttatccttagcgcaggggccatgctaacttttcttctctatattctatgtcaccatatgcacgagtgaagtagagctcaatatagcccctgcctcaagggtcggctcgggggtcatcttccgatctcccccagcaactcgggtcggatgcggggtgactgacgctaggcactccaactgcccctcgctcggtaccactccgtggtacatcacttgattgaccgtgacaggtttatccggcagcatggaaatagaggggaagacagagggtataagaactgctggcaacggtcggcccttgaagcagatagcatacccctgggtcgttgcctgagctgtactgctataacgcctgttcaaattttgtgcaaatctaccataatcaagatggcaacaacattaaccggcggaaacccacacatcattcaactacccaaaactcccaaaactacctccgacgtatcccccgatccgcaaatcatcgcccagcaatggctttcggctctcgaatttcaaatctcccgtccagaaaatttgaacattagagagctattccaagctgagtcctggtggcgcgacatgctggcgctggactgggacatgcgcaccgtacgctcagccgccgagattcaaagcttcctgagcaagcaacaacccaaggcaaaattgtccaaatttcgactgcaggatacgggcaagtttcagccacgtctggagcaggtcgtcgacggattgagctggatatcttccatattcttcttcgagactgccgttggcactggaacgggtatgttgcgtttaacccaggcagagaatggagtttggaaggcctatgctatttatacgtcattgcaggagctcgactcggctcaggagcctctcgggaagcgtcgtgctgaggggacgaatgagtcgatgcctggtggtctggctgggggcacatggatcgagcgcaggaatcgacagaaggagcttttgaatgaggagcccactactttaattgtcggggccggtaaggaatttctatgttaagacggttgtctgtgattgagatactaacagtcaataggccaagctggattgaatataggtgcacgtttacagagcctcggcgtgtcgtgcttaattgtcgacaagaacgagcgcgttggagataattggcgtaacaggtaccgggtaagcgacattgaaaggactcgatctatgctatggagagaaatactgatttatcgcgatgcagacacttgttacgcacgatccggccgaattcacacacatggcctatctgcccttcccgcagaactggccacagtttacaccgaaagacaagctgggtgactggtttgaagcatacgccagcattatggagttgaatatctggatgcaaacctcaatcgtctcagcagagtaccacgaagctgtaggccagtggacggttgtcctcgctcgcagcgacgggtcccaacgcaccctccgacctcgtcaccttgtatggtgtacaggacattcaggcgaggcaaaggttccctccttcccgggccaaaactctttccagggtaatgtgtaccacgctagccagcaccgcgatgcgtcggaaagtgatgtacgtggcaagaaggttattgtcgtcgggactggtaacagcggtcatgatatcgcgcagaacttttatgagaacggcgcagatgtcactatgctacagcgcagcgggacatatgttataactgccgacaagggtgtcttcatgatgcacagtggaatgcatgaagatggcgggtacgttctcaaagtctttcctatctcccaccccatattcacataatattaataccaaacgtgtaggccaccgaccgaagaatgtgacatcgtctgtgagagtctcccctggcctgttcaatttgctttgagtgtacatatgacgaagaaaattgccgacgccgaaaaggagaccctagatggactccgtcgggctggctttgaacttgatttcgggatagatggcgctggcatttcacgtgcatactttacccgcggtggaggttattatatagacgtcgggtgcagtcagcttatcatcgatggcaaaatcaaggtcaatcacaatccgggcggtattactggctttgggactcacgggctgcttttggcgaacggtgattccctgccagcagatgttgttgtccttgccaccggatatgataatatgcgcacgacagtgaggaaagtcttgggtgacaaggtcgcggatcggtgttccgatgtttgggatctggattcagagggagagcttcgagctgtaagctgccatttactccgacgatcgtcttaaaataaatgctaatcacactgttcagatgtggcgccccagtggccatccgggattctggtacttcggcggaaacctcgccttatgccggatctactctaagtttctcgcactccaaatcaaggctgtcgagtctggaatatcaaacggtgtacgacagtagatggggagagggcctttgtgattgttcaaattgcatttcatgtgtaatcaaagaaatattgcaactttgatactgcaatttgacacattaatattatctattccgatagatgaataaactccgacgatgcgtcataccccaaatggcgtgtcgcaccacagtagcctctcagcttccagctcctcctcatatgtatctcccgtgaatgcatcactaatgacagcttgtatttctcggggcggctgcgcatcataaaaaagctttgtaaaatcccaatattcaggatagaagccggcaattcccagtccacaattgcagacacgcgcccaaggtcaataagaatattgctgggactcaggtccgcatgggtgaagacagaccggtacggacgcgcgtggacagccgcaatattttcccttgtcgcattgagctcgtatttatggatgaggaaggaattgaattcaacagtctggtaaaacggaccacatatgccggaggagaaacaataatcaaacagtgggccaccaagagtgcctccaaagcagtacggggtctgcagctcggatgttttagcaggggtcaaaaatgcctgcagaagaggataaagagagccctatagtagtttggcaatttagttagatttctgtttctcggtctgggctcaaaatttcccaataagcacctacctccggatccatgtcgctgtcattgaaaaggttcaatgggatcacccagacatgatcgaaccgaacggatacattggggtccgatggtctctggtctagcataagacagtgtgaattgcctcgagcttcaacgagtgtttgtgcttgagatgagactgagtctcgtctggtgactgctcttatgcttagcggagatatggaggccatcgggcattctggggaggctggttttcgactaacacttcgtaaccagtcgcttccattcaatttttgactcatccaggacttcctccggagaacaagcagggcgatcatgaatcctttcccagatatagcaagcagcatattctggatcaacggcctcatctaaaaatgctctccagatctcgtgctcggtgagtgtgagctgggcagattcaatgagccggatagtcgcgtgatacctagctattgaagattgaagccattctcggagatgagcgaatggtatttctatggaactatatcagaagctacaataaacctattgtggttccgttctctctgatgttggtccaactctgaagtcggaccgttggatgccaaggtcggatggacctcgggctaagcgctctcccaccccagatcgtggtaagtgatccaggtgtcctcccttgctgaggatgatctgccagagatgtatcgttctcttcgtggggctttgcgacctttttctgtctttgaaatgacgtgcagattaatttactccagttttggaaaagtttggaaaagtctaaaaaatactttttccacccgccacacgaggcgttgttgtttaccttcctaaaagagaagagctaaccggacacgtgaccggctttttcgttcaccggcaaacatatccccatcaggaatttgacaggcattcggaccaaacccaagccacagctacgaccgatacacctcggtaggttttcgattccgttgctagaaggcgtggttggttagcgttgtattgttaaaattgcataaagaaacggcaatcatgagcgaaagagggtcggaaattgtctatcgagcggaaaatgtcccaattcgcttctttaaagcatgtcgatggtgcaggagacaaaagatgcgatgtgatgcgcgcagccaagtcccctgcttccgctgtcgttctaccggccgggattgcattctggatccgatcgatgatggccggcgacgaaatgatcgccggcggaaaacaacaacccccgcaaggtgagaataaaattatcggtcttagaaatgagaacagcgagctaatatactgtcaaagaagcactgcttcgccgctagaccctaggacgggataccacactccggtaacaagagatcaggggttctcgcctgccacagtgcaagacggtggttttaccactccgattgattctttgcccgattctactggattaggcagcttacagcggtcttatacatctgatacgaatggaccggaatctcagcagcttagccccaatgaaatgatcgcgcctgcgtcagcggtacactctatgtccgtgaatttgctagacactaatgatgtgagccctaatccaaccatttacctaattggcattattctaacatagcaagatctttatggaaagctctgttaagggtgaccctaggggggatgtcgtcgctagaggaatcgtcagtgaggagcttgctcgtgtcatgtatgagaggtatggtactgacagccaaatgaaactgcaaacaattataaccaaatctaactcctcggctcaaggttcacgggtggatcgaagaactttcttcctctttttgatccgatcagagacacattcgactctgtccgttcaagatccttgttttgctttacggttattatctatctggctagtcgcgctgtgacagatttgcgcggagacacgcatatgcagcgtgttctacaagatgaggcacaacgtttggccgaagacagcttcttcgagcgacccactaaactagaaacagtccagggaatgattctcctggctgcctactctgaaaagacatggttctcgattgctcttattcttcgcaccgccttagattctggattggagaaatctttggacactttgctgtcccaagaaaatataccccgaagttcgctctcagcttctatggctgatcgagaactcgtatggaagacaagaacctggttgatcactttcatattggagttggacgtcgcatctggtacgggacgcaaatcacgcattgccgaggtcgatgtggtgaagttgcgcagattccttgactatccgctctcgctgccctttgatatgcgtactgtctgtattattgagcttcatcaacttcgaggtaaagcgaacaaacctacacgtgcgatttatgtgtcaactattaacataacatatggcaggcaattctcgtgtggttattgataacacttcaactgttagcgatattgtgtctacagaacttccggccattatgacaagattgcaaaactggtggacgacatgggacgagatccatgaaagtaggttggcctttcttgctttgatacaactacaatccggatcaactctgactcgaacaaatttgaagacaatggttttcatataggggcgtttcaacgcagcagtctcaagcttatgcttctctatgccaggatctttgttttctgtgcttcactggcacggattcaaaaattacaaccgacgtgcacggattcaaactccgagatccttgaccaggatgtgatgaatctatggcagtcccttgttacgaccatcatggaccaattaaactttttgatcaacgagccatcttatcgctgtcaattaccctgggcgccaacatatccagctctcacaatcgctttcgtcagtaagttgatcatttcctcaatcggttgcatacaatttgctaatacagacttagcaacattccctcttcgcatcgccagatggcgtccaaatctgatcaatcaaacccttctacttgaaagagcagaaaagatctgcgatttcctcaagcaaccaccatatcccgatatccaccggactgtttccatcttcgtcaactacgcacgcgccttgattgccagtcagtgtccgcagaacaataatagtacagatgtacccatcgtgtccggtcaaagtgagggcccgccattccagggagctgataaccccatgatcaacggcccgcctccatcaggggtgggtcccctcgaggatctccgctacagaaccggcccgaccattcaggcagataaagtttcaaatatggtctcaatgccaagtagtgacccatctgcagtggctagagcgccggtatctcggctatccggcaccatggaagcaccgaactggactgtatcaaactctattgcagattcttttggtctgtttgaggaggggcaaaacgatatctttgatttcttgcctatgatgccatcgattccacagtaacaactacatacctaatacaacttattgaatattatcactccgattccactgtccagctgtgtaaatcgtgcaagggccaagttctagccttgtagatcaaagccgatacgtgttctatcgaacaacaaattgggccgcaacgcgcaatgcgcaacgcagtgtacttgtttattcacgtgtgttaagtcacaccggtctagatatccactcaaaatccatcttagcaatcaatttctgcgtcaggggcagccatccatgtccggatcctgcccggcgccgtgagtggattgccctaacagccggccccgcaccggcgccggcttcccacccaaaaaaatcgaagtataccggtctctcattggcttgttgcctactttaatatgatagatagaggcattatgcaagatcaacacgttctagccaggtgagtcaaagaatcttcaggatttttcaatcaaggtccgctggttgcaatgggaacgagaaactttctacttggcttatatagcgcttggtcctcatctaccggtgttcttgagaatcagaataaaaacatacttccaatcttcttcctttgtgttctagctgcccccacttacttgatggtgcaatatggcgtcagaaacgaaacaatctctcagggctcagatagccgccatcctttcttcaggtacgatcaaccttatccggtatttccggtctgctctaacatatattagacaatgatgacggttttgacgagaggtctcttgcctcaacggagaaaaatccaaagtcaactggtgattaccgaatagttgaactgtcccaagatgaattgcttgtcgagttccaggagaactctccaagaaacccaccgaattgggcctttgtacgcacattcatacatctatatattccgaagaattgactaacaaaaccaatagagcaaaaagttctacaatgccattgtagggatatttatagtcctcaatagcggcatatcatccgcacttcctagcaatgcagtccccgctatcatgcaggacttccacgagtccggagaccagcaaaaagtcttaccaactgccgtctttctcattggctacgtggttgggcctctgctattcagtccattgagtgaaaccattggacggaaacccgttctcctctggtctttcactgtttttgtcctcgctacgcttggatgtgctttagcgccaaattggtcctctcttctcgtctttcgaactatctgtggtctggcaggggctgctcctcagacagttgttggtggtatttatgcggacttgtttttcgatctgcgaacccgtggtcgcgcgatggcgatgtatatgtcggtatgttatgatcaattacgttaacggtagaatatgtgaatagtactaatatgtattctaggcttgcagtttcggtcccattctgggcccgatcatctctggatgctcagtcaaatatggttggagatggccttttaggattgacctgattctgtcgggtattacctggctggctctgctcctcacgtctggtatgattatcacttggaccaacagtggcatcagctaatctcaaattaaaatagaaacttttggcccagcaatcttgaaccgacaatctgccaaattgagaaaacattcgggatccaatcgatacttttcgcgtcaagagctcaatctggactcgagattcactccgatggaaatcatcactcgtcccatcacgatgctcttttttgagcctatcatcacctcaacatccatctatatcgccctcgcatatagcctggtcttcttttactttcaggcctatcctatcatctttgaaggtactgctccatctggatttctcattgatctccaatactaacaattgatcgataggtgtctatgatttcaccgtcgagcaaacttccctcacatatatcccaagtatgtgaatttcttttcataatatccccagacatagctaaccatcacagttggcatcggcgccgcatcctccggcttcgtcgccctctactacgacatgatctacgagaaagccaaaaagctcaacaaagcctggacctccagcgaagagtaccaccgactccccatgtcctgtatcgccgggccctgtctaacaatcagcatgttctggctcgcctggacagcaaagcccaccatgcattgggtagcacccgtgatgtccgggttcgtcttcggattcggattccagacgatcttcatttcgcttcttacctacgtgaccgatgcatacaagatctactctgcgagtgcactggccgcttctgttattgtacggagcattgctggagcgcttttcccgctcgccgccgagccgctctataaatctttcggggtttcatgggctacttccctccttggctttattagtctggcctgcattccgattccttttgctttgatgcgattcggcccttggattcgtgagagaagtcccttctgccagaggctaatcttggaggagaaactcaaggccagtgggtcaaatacacctgtgcaagtatagagaaagaggcattattttcgggttttgcatttttggctttggattctggggaacctggtttattggccgggaaataagtacgaaataatgacttgatacctaatttaataaaagttatgatttacaactagaatacgacgccgaaaataaccgcttttgaggccagaaacggcggtctttccactcgtaaccctaaaacaccactattctgcagcccagcacttgaagtcatccacgagtcctactgcggccttacctattgggttagacaattgcctaaataggaagctactcaatcgcttggcgccaaggcagcacagcacctcaagacctacaagttgaagttgaagttgaatagtccagatcggtggatctatccacctccacttactgttcttggcgtataattagcgtggtatcttcacagattcaaaataatttaatatctaagcaacggcgctctcaagcctcaatccaatatatggtagggtccccgcgtatcactaacagcctagcatccatcgggcatattataaataaggtttatacaatatagaagggaagaattagaagaaatctacatgatacgaaatacaagcttaatactagggactaagactaattagggagatattaggcagatctctgcgcaactagaaaagagggtgaattgctgtagatcatcatcatcatcatcatcttcataatgtgaggagtatcaagtgtggagtccccagaagtcacgaactatggagacctggttgccaagtctatgaaaaatcggtgtgccgatcttgtgatttataggacttatggctgttttcttttgtttggtatgtcgtgcaagttatttacatgtgtgcagatccaccgtataagccattttggaagtttagttgtcaaaacaacccgccccgtgaccgcaatgtctcttcctcacgatacataaaacgctcgcctccgggagacctggtctccagcgtcatcctcctttttgattcaacttttcagtgtttcccacaatggacaccccagaaccttccgttctgctccttcccgacgatcccttcttccatgagctgttcaatcgccatacccaagacccagaagcatgtgttatatatgaccgagcctcggagcgctcggttaccccgtatcactttcttgtcgatattctccagactgtcgacagggttcgccgcattttgagccaaggcgaagaaacaccaagtgccaataacatcttcgtttgcgttctggtgccctacggctatgagtatgctgttactatactcgctctgcgagcacttggactcacagcagtaccggtgtgtaagtaccaaaccccaagtccctaaagttctctcagtacgacctgaagtaggctcttgcaagtctttatttccgaacctgacttgtggtgcgtggaacagcggaagccatcttacctgaggagttcgagtatttcgttcaagtctgcaacgcgacatatttaatcacaattccttcactacaggatcatgcagagtctcttctcagtggtactagcctcgccattctaaccctacagcttcccctctccatcacacagccactgccggtgcttcgaaaacctttacaagtatcagagacctggaatacagaccgtggagccattcttctcttcacttccggaacctcaggccctcctaaaggtgtacttcatacacatcgcagcgtctacatcggagccaaagaatggattgaaacctatggcctgacccgcgatgaccggatactgcttccctggaacagccactggtgcgcaggcttcatgatgctgtctggctgtattctcgctggtacctgtgcggagatctgtccaacagtcttcaatcccgcctggttctgggagagaatcaaggctgcagaggtcacattcctacatctaacacctagccttctcggtccggctattgagtggtacgcaagggaagtaatacgtcagtctccacaggaagtcgaagggtacttggtggggtcaaggcggctaaggactgtcgttattgggtcgacaacggtaccgacgccggttgcagatttttggattgagaaagaggtcaagttcgatctgcactatggttgtaccgagtgctggatgatcgctgcgacagactggagaaaatccgaaggtttcacacctgtgagtatcgtaagcctcttgcttttccttcttgttgaattaacgttgtgtgaaagcgtcatgttggaaagctagtgtctggtgtcgaaacaactctcgcaagtgagagtgaaggcgagatggcgataaagagtcaagggttatttcagaagtaagcagttttacttgccatcataacagtgtgaaacgaatattaacagcattggcatgcttaagatatctgtccgctaatcctcacatcatgaacaacgtattcgacgacaatggttattatctgaccggtgacttcatccgacgtggacacgatgccagtctcttcatcctcggccgtgcttctcaagatggtgagcaatactctcgactttcccgtccaaggtttcctacttttgactacggttcacatattctgttcgcaagctttgtccacactgctgatcatcctgttccatcgtcagtggtgcgcttctctggctggaaggtctttactttggacgttgaagacgcccttctaaatatccctcacatcgctgccgccgtagtccttggtgtcgacgatgacacggtgggccaacgggtctctgctcttattgtgacaaaacctcagcttgagcagtcattgccacagaaagtatcccttgccacactgcgaaggactcttgctctcgagcaacaattaccggtatacaagctgccaacgcttatgcgagtcttagccccaggggaggaaattccgcgaaccaacagcggcaaagtaagcaaagcatcagctcggaagaagttcttcgcgtcagatgatcttgattccgagaaagtggaagcgtgggatctgaataggaaagacgaagatctaccgacaagagcatgggattgggctggaattggagcacagtaattcagagatacacaagcgcaatcacacgatgccagacaaataaatgcaaatttccggaaagaagaaaggaaaaggtctgatactagaatacagacgaggtaatagacagatggattgccctataggctggttccactttacagttaggttcatgaaaaggacaatcggcatcttacgagagggcattgggtgctcgtggtattcatggcattcaattttccaatacttccgagcaggttatgacaacgcttacaaacttgtgccgttctattattgcggcaccctcaaaatgtacgaaatatatcttaataggtttacatcacccccatcatcgatcgaattacagatgcaaacaataaagtcccaaagtatgtctacatgagagttactgccgagaggcacgccatatagatctctttgcctattcaaaatgtttcctgatgcattttacctaactcaattcatggcgcggcaacaataacagacataagtcctaaattccccctctctagcctaggcatacgaccgtcaatatcatccgttgtgaaactatctatgccattccaagtcttggtttgtgttgatcgaaactcagcgagcatcttctcttcttctttgctggtcggttcctcgctgtcagttttgttcttgtatcggtcgaacgctttgacgcagaagtggaatgatttggagaattcggcttgcgtgagtttattcgtggtgtcggctgttccctggatgactagagttgaaagcagagattagagacgaagttttgtatgtgggaaggtgacaaaggggggaacaaagttagattctccatgtgagtccagtagatgggcaggacttactcggcttgaagaaattgaacgctcgatcgaaattgtcttcgccgtattcactcaagaccggttccttttggttacctatttgcttgtacgtactcaagacgacaagcagccagcgtgagtaacctgcttttaccttattgctgtgccattttgcggcaatttcctcttcgcagtcgcctcgaatagctgccgagactgtcactgcggcagaaagcgcgcttgttattgccagatggactccggaggagaaatatgggtcgataaagcatcccgcgtcgccgataatgcgtgcatatgggaatgcataggaagatgagctgtatgaaaaatctgacgccgatttgattcctgtgacaagttcgcctcccgataggaactcgttgagatgcggtgccagcttcagagacgataggtagaagtctctacttgacagaccagaggcagcttttttcttgttcatgatttcttggttcatgacaacgccgacggatgtggtattatcatggagagggatgaaccaagcccagccactctcatctgtaagttaccgtcataatcattaattgcatcggagaactattttctgcctcgtacacagttgtagagtagacataccgattagtgcctcaaagtaaggcgagtcctctcttgctgttccgattccatatttccccgtggatctccagtatccccaacttgcaacatttttgagaccttgattaaatgtgcgattcttcaagtatttggtacttagcaaccctttactgccgcttgcatcaataatgtaatcaaacttcacagcgccgctgacaccctcggatttgagtgtatacgacgcagagacaggacgaccgagagccgaggcaccgctttcgtttccggccgtgccattcgaagtaggcggttgtgcgaactcgattgagttgaccttgaccccgtcaaaagcctttgcacctgactttgccgcatgtcgaaatagtaactcatctgcttcggagcggatgacgttccacgtataatgatttggtccacctgaagcgatgaaatccgtatctgtcgacgagcgtcagaatttggagctaagcaccataattgatgttcgctcatagactcacatccctcataatttgcttggttcagtgtgaaagctgcaccgacctgtataagtcagcttgagaaggcaaccaagaccgtaccgataccaaccgccaacatcttcaagagcttgacgcaatattcacatgatactctggacgtggcgggatatggcagtgctggtactgggacttgccttcttcttaaatccatattgatcgaatgtggagtcgcaatcgataaagcttaagtagtaccgcattgaaggtaacatactctcgccgatatgatatctagtcagtccacgttaagaagtgttgctttcataagtttagtgaaacaagtcggagatttttgaagccaaaggtgacaccggaaaaatataacaggcagtatacagggttataaaggggaatctgtgaaaaatcggttgtcatacctaggatgtacatcggcctccaagaggacagtatcgatgccctctcgagctaaagctgcagcggcataagatcctcctggcccgccaccaacgataaggacagtgcaatgctcaggtattgacattgtaaagcgcaggaattgaagatagaatgtgtggtttgaggagagattgattttgcctcaattgacacggcagtactaggtacggagtacatatcggtaattccgctttaggatgatgacgagtaactaaatcactagttatattgtatgtacaccgacttttcagggacttatgcgggtttcagctgagttattgtccaccggatctcagagcgggtacggcatcgccgatatggacccgctttcgcgacaatagtagtaccaaccaccaagactgcagatacctaccatgtgtatgtaaatctctaacaaaattaagtcactttggtcatatcaactgcgtcatctatcaaggagttgaatcctttaggaatcaggtacgctaactaataggtcctactaatcacaaaaccaaggtcgcttaatccatgaaattcaaaaagtggagaaaaatagatcataactgatcttccaccctgtgcccaccttctgccgaatttagcagggactatacctactagtacgtcatgagtgtggaacatgttttgactacggagtacaaaacaatacaatgtttcctcagtcagcaccagaggctttcatatcacattctcactcttacttatggctgcactgggcatcaacaaaacgcagctaggagagcctttgccccccggagatatacatgtaaggctaaccatcagtccaacgcaactaggatattttctcactgatcaaagggcgtgagcgtgagccttccgctatgggaagatacggttggatggtcaagccgaaacccgcaagttctggcgctgctaaagacaggataccctcgattctttatccatcgtcttatcgacagactcgcggagaagattgttgagaggtttcacacgcacaatgaccacttactttctttgtcttcaggaagggaaacgttgctaggaatgctatttccttgcaagcgaagtgcagatcagtgtgcgcaatttctcagaaaaagtcttcccgagatccagacatgtcggttcacagttctctctttctgcaaagagtcaaattcaccgtctagacttcagacaaaattcggtgtagactggcaaaacttggaactgtatgctgtagtctatcccaattcggcatttagttttgccaagtcgttctggcagcacacgggcttcgggatatcaagtcgctatgcagtactgtgcctcgagaagcaagacctcttgagcttgaaaatcggtcgctgcgatgctgagagtgggtctcacgaattggcaaagggactgggccttccggcagccggggatatagattcgccaaaagcaaggcattggatgctgcacagatagcagagtagtaaaaaccctttatcgaagtttgaaatgaaataatacccaaaaaattgacattggcggaatgacgctattagttatacatcagtctaggaaaaagaattacgataatcacgatctctagcacctggacgaaactgtcgacctgagaagtgatatatataatttattcaacgccgataaatgagtgtatacggaaatttgtatggtgggaatagcttcattttctgaactgagcgctgtcatggtaattcgggtattttaatttctgccagtctattgttgtacttcaggcatttgacctatggccgctctgaaggcaaaaccaacccgatatggtaattcacagtttacatgtaagtacttctgtgcaatatttacaagggcacaagggaggcaatgctaaaagataaaaataaatacaaagccgagacctatcggagatagactgggagctaacttggaagatctccaacaacagcgtctggcgctggcgactttaaaatgatttcgcctctccaaaacaaaagtttgactagaaggtccatcccgaagtatctatatctcttctccaggaccaatcattgcaaggcttagctaggccatagatggccaatgtattgttgtctgctcgacccttgggcttgaagaattccgggtcttcaaatcctacgaaatgactgaatataagatgttaacaacctagtttggactccgcatcatcacctcgcaagatatcatgtaaaacctacattgtttccctttcctcgttccatatcaaatttgtaagccagctatcgactggtaactaggattccgatatccgcagctttactaatcatatatcagtatcattccaatcattccacaacaaacagcctttcaagttagataaagcttactcgtattcctctaggaagactttaaagatttttgcacgtttccggcggctactcccagtacatgctatccccattttcatctccaagggcaattccctcaactttttcaaagataatccatgtgataaagccacctcggacggaaccaagaggagtcctgagtcccttgctcccatgctaagagcttaggggtattaggcgaatttctttccttgagggcttggtatgcctctagctcgggcggcgtaaattgagtggcttcctggggtcagacagggcctatatcgcccttggcagagggaatctgcttcacgatacggaggaaggctgtgggtccattaggaaattgggcatcacgacagacgaatttagtggaggctagggaggggtgggaggggtaggagatagcatcttgccattgttcgacgtgctcgttaatcttttggacgacttcccagttagaagggataggctcgctcagagtcaagatcttgcattctgaatcctggataggatcaggaaaccatattttttgatcagccatgatgggtgtctgctagaacaaatttccatgtaggaactgacttatacatatatatggatgtgacgtagctctgatcctttctataagtaacgttgttcttgttccatgaaccttagaactttgctcatcgtgcggtgatttgaacactgtggcagcgtttcactaaatgtctgcccactaagtgcctgtccaaaggtgtcatcgtgcctgattactggtgaatatcccagaccccagtcgctttcaacatccactttccgaacgaaaacggtctcatcgtacgttgtcaagaacgcgtacttgaggtcccgctcgcgcatctggccagccaattgccctatacgttatataaatgttagccttggaacatatcgagtttgggggattatatgatcacacgaacctaggtaccgcccaagcttcttctcatttccttgttcgaatttgattatggccgcatccagcatattaactttcagacgatcccatggtgttttcgcctctccgacgaccttggtggctctggacgaatcaaggactacaaagtctggaacgcccgtgaagggagttggcctcgcagccttgtaatccgcgaatcgcagattatacccttgggtttggagaacagttgtcactgcctgtctatttctttcgtggaaccttctgcgcacaccaagatcgtccccaaccagaacctgctcggttgcgacagagaatgagccgcctatgacaatggcctcgattaccgccggatcccaagttccgttgtgagaatcgtacttggcgacgacatcttggtaaaaactctgccattcgtgaagcgccaggtcgatcttggacaaggagtgcattcaatcaaataactaagatgaagaaagaaagaagaagcaagttgcaaagttgaagaggccagttgatatagctgaccactttgcaaatgttgtaaacaactaaccttcaacagtacacagcaaacgccgggatatggaagtagtgggttccccttgctttggccctttcgagggcagctttcaaggcaggtacagtcactctgctttcagtttaccctcacatgaacttcagattgcaaggttgggtgagaaggtgatgatgatagtgatgtcgacaaagcttcatttttacctgcctagacatgtgagttgaactttggtaatttgcttattcggtctctgttatggtacatcaggtattgaagagaggagaccctgcaacgggggcggcaggggcactgacagctctatttgcgaaacagggtgagagcatagtcgtcacttggagtagggtgccagagaggacctaagagaagatggttgaacgtgtcgttcgtttctatacgaatcacatgccgctgagtcatcctgcactacctaaaatcaggcggaattcaggcatcagccctaaaaaaccagacatagatccctgcccgccatggaccttcgcagccaatgccaaacaatcaaaagataaaaagcaaagatgaagccaaaccccatcggacttagatcaataactcgggcgctaactcgaaacctccccaaccagagcgtctagttgcctggcgtctttaaatcatttcgcctctccactttcaaaaggtccagaatcgcatcttggtttattgattttcttgattttcttggtcttcttcataatactcttgatttatttctcgtttctcgaaatgtactcgcatcttgaagctgaaggcacttcggtaactgtcgctcattgcaaggcgcaaaacttacgagttggttcgtgatcccctccccccccccacttccctcctatccgtgtttactcccgtatatgtatggactaacccgacaacgattaagtcgatcgtgttcttgagcctcaaaccgtcgcacatttccttcaatttgcgttcggtaatgagcccctaccaaatggtgttcaacccaacaccgagcgcttatctgctgaggaagcactcttcatcaaaccaaatcaaaacttccctccagactccgatggcgaacccctcatgaccactgtcatgtcccggattggttcccaccgagatcccagtcgtctgtgcatggtcgggaagaacttgcaattcctcaagtcccgtctatgggagggcgtcatccccctgagcgaccagctatggcaggagaagggcctcgaccgaccaaagcattttgatttcgcgtgtcagtatctaacggccgtgatcgccgtgttccagtatttgaatgaaccaaccgtgcgattatatcttcgcgacacgttcaattacatccacgagcattgggcagcgctcgacactgttctcaacagccgcagagcggagcaaggtaaaaatcgcgttagtgtcgccggtctctggacaatgtacatggcggctcatttcgagatgatgagcgagcgcgctcatagatgggttactgtgcatgtcaatacactacgagcgccattactgcgagctcttctagagcatcggccagtagatgggggagccaaccccctcggcgagcctgacgctatgcaatggaagcttagtgatgcgctgcacatgctagctgaaattaccgccaacgcggattacaccatcatgatccctatgaacggttataaggggtatggggcagctcccccgcgggacggtccgccagcacttcatgcggtgaacctacgggtgagaagtaaagcataccatgagcgtgccaggctgctcactcgggaagagctcgcccgtagtgcagctgcgttcatgggttcatctacagtcccttcggccgcagtatcataccatacgacatcccagtgccagattaaaggccagaatcggttgaggaaagagattcgtggtgcacctattgaacccattccacgcgagccttggattgctgcctgcgcttcgaggattgaatccggaaggagggagcgtaggtacgggttcgctgtgtatcggttgacttacgggcagacggagtctgaatgggcagaatttgtccgcaaagtggaagctcatgtttcggattggggcaaagggcaaacaggaagcggcgcgatcaagaaccatttgaggctgcactggctggatgggaaagagtttggtattccagagggcgatatcgatgcatctagaaagtgagtatgccctttccctctcttttttcccctatcctacactacgaagctaacaagccaaccagacacttcgaaaccatcaaaaattccctcgatgactggtcaaagttacaagtcagggctttcctcgccgttgactccgcttgctttgcctcatacaccaccaattcgtacagtgccgttacatcccggctcattccaggtgactttgccggcttccttctcgccgtcgatccagaattcgactcgaagaatggtagtgaatcagccgacgagtctccaggctacgaaggccatatgcgcatcctcggaagtcttgtgtggagtgatctctattccttgctattatcacagacggcagatctcgaagaatactggccattggcaagcgagcacccgaacatggtgtatgtcggcccgacaatcccatggcagcgatacatctggaagaaacacaacgatatgcgctggaatatccttcgagcggtggtagactatgtaaagcgtaacccgggagtgccaacaacgcaagcaccccgggcgcaaggtacgcttgcagcgatatcccagaccgcagctgcgtctacaactacgccaacaaaccctgctatacccacaccgacagcacacacagagcaggaccctaaccacggagccttccgcacattcatgctcctcgagttccaacgctacttacgccagcagggtcacccgcggcgggcggccatggtcgatgaattgctccgtattcagcctaatgaggagccggatgtaggacggctgagacagttggtgaatgatgagaatgaacgacaggagcagcggagacgagatggtttgggtgaggatgaggaggcttcgggggagtaccggccggactgcccattgcagtgattagggctaaatttatttcttattagttgcgaatagttctcatcatggattgaaagggtttatctcgctggctggtctagggagaaaaccatgcatacaaaggtcaagggtgacatattgaaaaacgaaattgaaattgtttaaaacatgaagcatagccacccgcgctgacatcaaaccgcaggaagatacactaaccccgaggcttgaagcccacaccccagcgccaagcttagtcatagtcccgacgagttcgcttgcgaggacgctcatccgggtccacagccttgtgccaaccaacctggcacatatcctccgtcaagtcccttccacagcaaggatgaaagaacattttcggccaagcttcgcgatattcctcagtgtcatatccatcatatccaagtccataggcaatttcgtccttgtcgcacatttcctcgtcgatgatgtcgagctctgttcatacattagttacatttcccacttgagcgcatgtgtgctaggagaatacacgtaccaacgtgatatctacagcttgtctctgagtttcgggtgacgtcgaacttttccatgcagtagatgcagtttgcaaagcgggatgtcattgggacgctgacttcttgctcagaagtaacgcgcgccgaagtgacggcgacctcagaagtgacgcgggcggtggaagagacagggagaacgggctcggttttcacatcagcctttggtgctagtagccattctgaagcaatcttgcggccttcagggctgttcttgatgatgtccttcaggataccctccagcagtaatttagattgtttctgcatttctactaggaggagtgacaggttctctggttgctcgtcaggtgaaggcatagtgacggttgaatgaagtgcaagtaacgtagggagtaaagaaaggtgaagatctgttcagagactttgtgtctttttgtgggctgcaacgcgcgcgtcctttggttatagaacaaacacgactaatcaaaggggcgcaccgcagcgaacgcagcatctcatgacaaaggcatatatgcgggaatgaactattgtatgtgcttcggtcgcactacatcgtcatttcaagagagagaaagactctgtgccaggctattccaatccgagaagtcgacaaagttaggatcccaaatatcaatatcgaagcctccgtcaagcctcgaatccctaatcccaggtccagtcccatcagcacagacaggacaattcccatggacaattggatgactctgctcatgcgcctggcgaatacgccttgccttattccgcagctgcacaatcatcggccatttaggacccgggtccggccatgagggatcatccgtcaaatcgaactgcatatcgatagcgcgccaagctcgttcgacatgcggaccagtggggtaaacacacagagtccagagaatgaacgtgaagaggtggtactgggtgaaaatcatcatcatccagcggaagccacgcagtaatgcgttgctgttcatctcaaggccaatttccatgccatagcaggcttttgccagcgtatcttggacgaggttgtggtcgagtgaacaagccgccggtccctgtgactgcagctgtttctgtcgaatgcacacttcgatctttgtgaggagcagccggccgaggaggaagccgaagcgctggattgggatgtttgggtcgctgtggcgcaggtatttctcctctattgcgcctttaaactctgcaatgagtagctcgggatcagatgctcctactatgcttcggaccaacgccggccgtctgctgttgatttctaggacgattagagagaatgtcaactcggtccatcggttctctgatacggctgggacgatgttcgtctctgataaactctggtcgtcgacgttcaaaggaagttcggtgtcgccgtagttgctttctgggacggtgagcccgtggtcctctgccactcggctgtcggctgatttgatatgtccccatgttcgtcggcgtagctcgcattccaactgtgggagtttgaaatgtttcccatcccgatggagaccgattgattgtgcggctcggatagttactccatgtaatatccagccagaccggccgctattactaaatctaaagcatgcctagagggcaaagagatgtcagcgatgacaattacaaaaacattgatcaaagacacatgaagcaacattctctcacctgatatatcaccatcgcttgcaacgaggtaagggttggagaatccaaaaactcagcgtgatacaaagataattccatcccatgttggtaccgccgcagattcgcatgcaagacctcattacgagcatcatctgaaagcaagcttgtcgtagcggcaaaacaaatagcaaaaagcaaagcacgtacatcagcacgcacactctcaggctggttaatggccgcaaagatacgcgattgtgccgtcggaacatgaagaaccttcaccaagggctctacacgggcgataaatgtctgccagagcagaaccgcctcccaacgactgggaaatagctcttgggtgttaatctgcgccgagagcgggttcgtgaagatgccatctgccctcaacatcggcagtctatgcggactagttacagcgacgggtgattcaattgcagatttcagctcctgctctttttccagcacccgcgagagaaacggctcgttgatatatcggccgtctttgcctaggaacccctggtgggcggggcattctgccgcagcggggttgctcgatgagggtctgcagtcggatcggctattcggcgtcggtgggattgtactcgggcctgggctttgactgttggtagtcggtcgttcgtcgatcatggatgcgatgaactgttcaagctgttctaaccgtactgcaacatcggttgtgcttttcttcggggcttggcgcttcactcggcttggtcctggatactggcaggttacattctggcgtttgcatttgctgcatggtgagcccttgtcgcatttgatcttgtgctcgtggcagcgtacacaggatcgctctacgttgtaccggcgtgggtggtccatggtgctgtttcacaagctagcgaaatttgaggtcttggtactaggttaaggagaatttctttatcagatcctggcttctgcaatacattgactatcgagcgtcgaactggtgatgtaagttcggtgttcggtcgttcgtgaattaccgacgtccgaaaatgtgggggcgaaagccgcttggctcatgccctatttcccgtacatcagatgattataatgcgaatggacggcctccagatattgtgatggtcaattttattcatcctttgttcaaatattgacctccaggtggaatatcccgccttcaaaggtcggccaagtaacagaacacacgcatcaatacgtgtagacgttcatttgccaagtacaatcccgaagccagatgctaaatacaaagaacgctaataagaaggcttctgggttggtcccagaatccagagccgccaattcccccatgaaacagatattatgaaataagaagatcgcggacactcatgccctttctccttggaatatcagcaggcgcagctggggtctcctccacagacagcgccaatgccgtactcccagggaaattctcactgatcgaatcagcagtccctctccgatcctgagtcagcatgagcaaagctgccgaagcctcatgatcaaccccctgaaactcctgcatcttctcgttcgacgcccatatcgggcccagtgccgggctaggaaggatagatgacgcatcctgcgggatattggctgaggggacttgggtgcgcggagagaaggacggggatgtatcggggaattctgtgggagcagcgcgcaactccggtgatgcagaggtggagtatgaataagcagaagaactatcccttcgcataggcggctcgcctgtttctgcgatgaactcaggggatgttggagaggggggtgcggccggggtatgtgtgaatcctccagtcttcatgtcgcggatacatttctctaggtaattgacatagtcaatgcttgccttgttgggagagttagcatgttgtcaaatttcggaagaaatgtggctgtacctgaagaatggccagcttatgcatttcctgcccggtgcatgctgggatcatgtctttcaacgtcccgaactcctcgttcatcttggaccgtcgtcgccgctcaattagactatgtgcggtcttgcgggcgatcttgcggcctgcagcactagtcgcactgggctgtttccttttagagttcgatgtggggggcattgcgtcttctgaactctgtgaacccttgacattttccctcgtcctggtttttgaaggtgactttggcttcatctggatgatcttgcgagttctggttggtggcggaggcaaatcaaaatcctcgagcgggcgtttgatcgatgtacccgaccgtgcagtgtgacttgaacgacggccagagagttctggggaggttggtgatgccggggcatatgaaggatctgagcgagaagatctccgactggcgttactcaatgcagcaggaggtaatgtgaatgcatccccgtcgggcttatctttgatgatgaagccgcccgacatggctggagttggaagtcgtgacattgtaaaatggagggggggagaaatatgtaaataggtgcagagttgtacagcaaggggtccagactatataaccgtgaacgtcctcgcaggccaggttatagatagtgtcgcgtgcttccaaaggttacgcccacgagctagaaccggcgatgctgattggtggagcggagactcgtgcctcagggagcaacggacatttgctggagtcaactgtggggccatcccgagcttattggtaggtacctggtacttacattagcgtggtggaaaggggctgccccgtggtacctggtacccattacatcaattgaggtagcgcagcacgtgcatcgattggaggacagtctgcgctcgacgattacacggacgcactttatgtctcgtttttggcgacggcaacatttatattcccattggctggcgatggcctgtgtcggtctccatccacggttacatctgaagacttttccgttttgcgtgagacgccctcttctccctagagtacccgcttcctctcgagtcatccacacatggcacgtgcattctctttggagtcgaattgtggatgccggacaagctagctcagggacgatctgtttcggagttcgaattgggaagataacgtgcaataaagcattcatatcacatgatcccatgaccctcatccccttatccaatctatttacagtctcgttctcgtttcaagtaagaggaatagaacgaaagaacaccggttttgaatagggggtggagttcgagatcgctatggggcagttttctcagtccaaaaagtcaaaagcatattccaatctctatagaaatcaacagctatatacgtctatatccaccagatgagttccacttttccaccaaacggacattagttgaagagcctctcaaggatgatattaccaaagtcctcctccccaggagactcatccatccgccagatgcgattaccagcacggccactcagccagagaccatggtcacttgagctctcctcctcgccttcgatgcggtgacggttgcggcgatcggtaacgcacataccgcgagtccactggcccaatgtgtcgactcggatgtcctcaggcgagtttgccgagtgaacccacttcgggtcgtcggatgtcaacgcataccagacgcatacagggtcgtgcagactcagcatggcatcgtcaccaacatgtccagggtgcaggcgctccaaggttctgaaggtgtgccccatgaaggcatcgacccactcagccagcggggagccggcagctagaagaggcgtaatggcctttcggaactgtccgcgtgatagattgtgacgcagggtgatgtcaagtgggaaaagacgcagagtcagttgccggctaagacttttaggatacggtgggagactcccgctcttggtgggtggaactgtcgtgtggggattgggcgaggtgagtgcgaagatacgcgcggctgccactgcatctgcgtaagcgttgaactcgcccattggtgtcaccttttaatatcagccaacgtttctcaatatttcttaaatctggaaaaggcttgacttacatttcctggctcattgatggcaccacccatgacgaccacctctttcacgcggagaaatgcctccgggtcttctgctgcagccaaggccagattagtgagcgggcccactgctaccagagtcactgaatcgggctcattatcacggagcacacggagaatctccttgtatgctggaagcttggacggggtgaatgcgtggtcgtcacttgagcagtcctcgacaggcttaattccctcatccaaagttttagcgaagaggtgctcccatgccttagtagcggtgagatgcgggtgcttttagaaatcagcatggtctacttgtttttaagccatagcaaaggcccggctttgtatgagcttcacataccgttgcgtgaatgcccccaagtccatcggttccgtctgcggggatgtcagtaaacggtagctgaaatggtagagtagaactcacggaaatagtcggcaagcattttttggtcttcaagggggtcctttgcaccgacagccaatataggacggcaagctctcaagctgccgaagccttctggtcggccgttctcgcggcgccactgcatctcccgctcgaggatgtggaacattgacactgcatttcggagacagctggatatcacgtcagaaaatgtatctgcttttcaacccgaaatgattccttacttctccacctcgatgttaccgaatgtcaatgagatgaggagaacctctacctcctccgcggtggcggacagagctagcaaaagggcgaggacatcatcaatgccctgtgctatggttaattctgaaattattgaaatggaatctcaggagcataccggatccgtgtcaatgataatcttctttcccatggtgaatgttgttgaccttcaaatgttggaagatgacggaagtgggagcttatcgttatcagttgttatcgggctgcggggtttcgtctggctatgaacccctcgtatgcaaatcatatactgcacactttcaagtgtatattagagacaccactgttagaatgatatcaagtgattgatcatggtatatattcccaacgaagaaaaatctactagtccaggcttaggactgcaatcccggtgaccgacggtccgcgggcggccaatccccgttatccacccgagcctcatgccccaccagatggcggcaacattctcggtgacaacatagttcctgctcgtcaaaatttctacgtggaacactttttgacggcacttttggagggattaaagtgatcaggagcttgtgattgttactagaacatgtgtcttgagccaatcatccataaccaatgtcgcagaataggtaagaaccaagccgtagcagcatttgcatctcaccctcaaacacgtggatccaacctcggtacctgcaatttctagcgcttctgatagcttgacagcgtggcggatgtcctcttgcctgtgaactagtggaggagcagaaaagcgcctgcatttaggttggaagctattcagacagagaacttgtatcttaaacttcctagctagaacacaaaaattgagggaatgacgtccgggtcttagcttatttgtccgtagactgggtgactaccgacgcgttcatactacgtgcacctacccatcttcggctacggagatttacacccctcatgtattccgtgggacttttcaaatggcaatgagagccacgacttcaggatcgtccacgagaaagcccggtttgatgtttgatgcagacctacatggacctcataacaaatatcgtaatgttatggtccctgtggtaggtgaagcagcatgtgctacgggtccctctgcctgcgctgtctcatggggctacggtgaaatggaggtcagagggatggggaggagagaaggagaaaagaagaaaaattggggaggaggggcgcttttatacccccaacccacgtgccttcctaaagtgcgacaggtccctcgcaccttccctgtgttctggcccgggaaatgagaacacaatcaaaggctcagcactggatagatagtacgtgagattataaagcgtcgcgtcgtttctatgtacagttggtaaaatatttaatgccttttcttgctgcagattgtacaaggtcatcacctcttagcctctaagcttcggcgcctagactaggcacaatttccgacacagtctgcacgtccttgtccccccttccactgaggcaagcaacaacatccttccccggtcatgtacagccccggcaatagcatgagcgctttctcatgcaggaacaataccttccatgcgacctagcaacgaaaaagcctccagtacattggtattattggccgaaacaaacgacattcgtccactttccttccaactggccagctccgggccaacgccagggtaatccagccccacagagatgaattgtgtgtttgaaatctgactactttcgtctttgtggtatataagtgctcacgctgtgaagaacaccaactgagccgcgacctagagttacagaatgttgtccggctagaggcccgcaatcaccagcttcaacaccaacgattgtaaccgatgcatcttataggaaatggtgggacatgcctgccgcgattgaaccgccacccacacaggtgactatggcagtatggagtcgacttccattcattgcgagagcgagtctccgtaccaataccattttgaaacgtccgggttcgggagttgatctggtggatatcacaatagttgaaaatcgaagacttggagacatatttcaataatatactccgtacatagggcttattagtcgcttattttagttcctagtcatgcaattgaaggctgagggcccaaaatggagttgatacttcccaggaagttctgaaaccatgcggcgactaatgctcatcatatcacttctcttctcatacgtagtcatctacgtaagaggagagaagggatcaactaaaggtgatgataaactgtgtccgacggatggaagataatgatctagctactaccatgaagctctctaaatatcttcatacaaacaaagccacaaagatctcatcctccagaatctagaagacacatctctgcaggccagataaagagactgccaagacggcaagttgccttacagctgctacggctgcctgtgagaagagagaaagagagaaatagatgccaaaggagaggtctacaagctgcatagggaaatagtgaaagcccctaaaagcatcaaaatctagaacagaggtagaatgaatactgtcagagaagtaaatgttcgacccctacttctcatagaacaaagaccaagtcgtacagcagaccaccaatcaaggcaccgctaattgatcccagataagaccagcagaggcaagtgacattccgaaacaagtcactgtcgtagcctagtgccaataaggcaagccgggtcccgaggtctcggcttggattgaacacagctccagtttgggaggcgaaggcagcgtgaaggcacacgaccacaaggccaaaaatgattgatctcataccggtgctaggactcttgtcgtcaacggctagaaccatgacagccaggaaaagagctcccatgaactcggttataaacacggtcgcaggcccgatccccactgcatattgaacggccacgaaactggacactatcagattttccgagctcgtagtgaggtaacgctcgatggattggtagcagaggctatacgcagcaatggcagctaagaaagcccctagaaactgagcgcccaagtatctggggacttttcgtttagggaagccgcggtagaaccaaagcacaatagtgatagatgagttgaggtgggcgcgagatatattgccagacaaataagtagcgatcatggtcgcagacccccagatccaactagtgtcggggtgggacttgttggtgacagcggcgatatttgcacaaaagccaattgcgagctgaatgaagacagctgccgcctcgacaacatattccaaaaggattccatggatcacggagcgtgtcctgttgctgatgtggaggtttacaggcatgctcaccgtagcgcctaaccgtctgtctgagtgaacatttagatcttcaggcgcttgttcatgaagctcgccctgtcgtgggcgtttagatttcaccccatccaaaatgagcaaggggcctggagcggtgcccagaacagatgccggactaactggcgcggtgctggaaatcagaagaacgctcttcggtagtactgaattgatggttttattattgccaaatgaggagctcattcttgagctgtggtcgttgttgcaagttgtttttcgagagatgctaggaatgctgatttatgacttcgccatctgtcagctatgctttcctccctgcttcatgttgaacttgacttaccctaaattctggccgtcttgcctggctccgctcatttgttttgtgataacgtgttcgtaagacaaaaacaaagagaaagaaaaaaaaatcgaacccaagctcaaaataattagcaaagaaagtagactcaaaatgtcaaattgcaaggaaacttgtgttcaattctttcggccgaccaatcgaggccaattattcctgcctggccccttgatcaggcctcatcgcctttgacatatagtttccatactatatttggacgtccatggacttttaactactagtaaatatttatcatttgatacttgctgagcccccagagacatcttgattccctcttagaatagccgtgttgtttattgtgaaatataaagccagacagcgaactgtgtgtataccacatttggtcactcaagaatcactgccgatatacggcagatccttgaaaatctcggccgagataatggagacgttttgatcttcgaaaaaaaaacatggcttgtaaaaagatccttatatggaggattagtcgagtttgcataaggttgtataaatcctgggtatagggagggatatatagatggatgggtcagacattggcaccgtagagctgccaagatcataccttgtgaatgaaaagagtgttggacttgtacttaacgcagtatattgggattcgaacctgactattataccctcatttttgctgcctctcatgccgcttctcagcctctgaatcctgatttcgcttggcaagggaacgacattggtgtattttgacaccaaaaggctagcttgcatgatacatgcacatatgtttccttttttcgagtgaaatttgccttacccggccctaagtgcatgcttgagtggcttagctaccagaaaccctgcgaatggtcttaagcccacatgtcatagcctccgcatgatcagcagtcgcagctccaggtgtcgggtgtaaataaagatgtgtcataagccacaccataaattgggtggcgttcctttcgaaaaactttgactactccgtacatgtctcgtgtcgtgacctttttcttgtcgttcgattcgttatgctttccagggacactttacagagtccacaaagctgggatcaagctaatgggaacaacctaagcacaatccggacgaaggcacgagtaagtaaacaaaatcacgctctagacgccgccacgtttcttggcaaacctatcaatcagaatgggcgatattccacctcgtatccccgacacacacacatcttagcgcgaagtgaattcggcgatcgagaacctctaggctactctcgggcaccatcaatgccactacagaacccggctaacatataacaggacgataaatcaaggtaagcctgagtatggcctgaggtgtttacaaaccgccgtacctatatatcgcagatattagcgtccatagcatgccccagcccctttttcacttccccgccggtcatctctctcgtgtttgcatctcagttctttcgtcttcgctgtctcacaatgtcacttcccgttgtctccgtcgcgggaaacgggctgttgtccaaaggcaaacgattccaaatcaaaggtaacttcattaaaaagaatgtgtaattcatgctaacatttccaaactaggtgtcgtttatggccgaagatcctctcgctcgactccgatcgacgttttggccggttcaagagccagtcagtgcgcaatcgatggccctatgataaaggcactaggggcgaatactatcagcgtgggctacatagatgcgacccaaagccacgataaatgcatgcaggttttcgaggacaatggcatatacgttcttgccaacatggcgagtcaaagggattggagccttatgaaatatgacaggaatggatgtcagctcgaacatagtgagtattttcggtcactatatgctcgctacatatgggtactaagattcccaactgcaggccaactccacatggcaaatgaacgttttcaaacaatacgcggctgttctggattcaatggccggatacaacaacctcttggggcttcttgttggagatgaaattattagtggtatgcagcctccaccgctcacggcctcaacaagatttaaatgcataaaataggctatacatcggtcgatctagccccgtatctaaaggctgcagctcgagatatgaaagcttatactgctgctaggcagtatcgtcctataccgattggatacgccacaagcgcagagtatacctatatgcaagcgctaggagaataccttgtgtgtggcggtaacagcgacaatgctgtagatttctattcggtcaatgactaccagtggtgtggcaattcgtccataaaagagtccggctacgacaccttgacatcgaaagtcgaaggcctatcggtacccacattcttttctgaagatggttgcgacgaagtatctccgcggctctttggggaccagcccgcgatttttgggtctaacatgtcaagtatttggagtggtgcaatcatcgatgagtggaggcaggagtaagttgcaacccttgatactcatttgacatgtactaacatcacacaggacgggaaactacgggcttgtctcatataccacttcaggagtcagcacgccaacaactctggccgactacaatgctctgaaaagccagtggtcttctatcagtacaaatactgaacctccgtctacgttatctaccccttcctgtcccgcatcgatcaattcatattggccgatagaccccagcgctgcattgccaacaatagcgggtcttgactttgcgaccatcaaagccgcgggtgctaccgatactacggatagtaccaggacgagtatcagtacgagcaccagtaccagtagcagccatagcacggaatccagcctttcaagtggtgcaaaggccgggattggtattggtgttgcgttgggcgtggtgctctccatcagcttcctcttcctgcttttctggcaccgacgaaagattcgccaaggaagcaaattacctttgatgacacagacccccgaacttgctgcgggaagtttgaatcgtattgctcccccagccgaactagctcacactactccgctgggcgaattagcccaaacaaattcattaaatgaactaccgggttcatctccgagggcccaagagcttgacactggggtggttcacaaggctgacaagcctaaaccaatcataaagtgaattacaacatctggatggtcctaagtattagctatatcgatgcaacctctcaatatcggacaatttatatgctaggagtaggtctattcttgtatgtctaactatgacgccaattgcagaaaatttcggcctctcattcttatgcttttactttctcccttagatgcagtcgacgtttccatttcatgcggctctttctcatcgcccgctgagtcctctctagagggtaattgactggggactcgccgccagtgaaaaccatgaagtcatataagaagccaccagcgaaggcaccacttatggtacccacccacggtccataaaaccaatacggattcaaaaagaggtctctgccgtagccaagtgccagaagggcaaggcgtgggccaaagtcacgagttgggttgaatgcagcgccagtctggtaagcgaaactaatcattaagcaggtgatgacaagcccgataatgagagagttcattccagcaccgggaggggcgttctggtcgtcaccaagagcaagaatagtggtggttaacacgatggttcctaagaactcgttgaaaaaggccgtggcaggcccaatccaggcttcacgctgattggtcacaaagctgttgataattccggtatccgtatttgtgtcgatactgaggtggtgctgaattgactggtaatagagcccgtacgcggtgagtgcagcgcaaaaggccccgacgaactgtgctatacaatactctggcatcttccgtttcgggaagccacgatagaaccacaacatgatagtgatagacgggttgaggtgcgcaccagaaacacctccggagatgtagattcccgacatagtggcaaagccccaggcccaagcggtggtattcgggtttcctgcatcagcaaccgtgacagccaggtcagcgcagaagccaatgaagagctgtataaagacccctagagcttcggctagagcttcgcgatggtgagtcctgatcacagaccaggtagtgtggttgttatgtacctcttcctcaatcaacccttgtacaaggggatgtagatcatcaggtaaagcctcgtgatcaaattcaaggctacctattgtaaaattatcctcgcgcaagtcctgtggaggctcttcgctcggaagctgatgctgatcctccccttcctcgacagaggacagcttggttgcattaggcgaaagccactcggagggttgtctcccgcgcattgacgaagtacgagatacccggctgaatccagcaccgccgcttaggattttgttcataatgttgctctcacgttgcaggcgagcatcctcaacttgggccgaaatctcctgtggatcagcggacttctggatctggcccctctcgatatcattggggtcaatgtcaaggccgagcttctgtgaattctccgctggaagctgagcagaggcatggttttccaacagctccgctttggttggtaccatgcccggccgtaccactcgaggcaacggtttcgccaaactccatactggcttggcgttggcaggttgctcgtaggaagggttcaggtcgatgtaacctggttggacgaacggttcatgggaaagtcgcaactgagtcgtctcgtcagggccagcgacaatgaactccccctgagtcctctctgcgagcgtggtccgcggtacgagactgggtaacacgctccgcctagaggtcactgagctacgccgtcggacatcagtgccgttactagttgcatcgaaggagacccttgtgggtgagacgaatgattcgtccgctcgggaacgggtgcttctcgccggcgaggtaggtgtgtctacagactcggactatggatggaaccaatggtcagtcacctcttgcctcatttgtgtttatctatcgttccttcctcactcgcgttctttctttctctgggttctttttggaattaccttagtccttgcaagtttgtttccttcggcatctcttctttccatattccagtcgatgattcgaggtaatttcttaagtgttaattgaaaaaaaaaaacaaacaatcgaaaagagaccagagaaataaagggtggagaagtatccgtataggctaggttatcaaattattagggcttctatttaccacacattgttactactgtttcaatacacaaatttcaaatgaacacttcgtttaaaggggggccaaactgaacaaatagatcgtgtcatcggacgccagcaccgatccgcaatgatgcgtttgtcggccgaatgaattcttcgagttattttgggctattacggagtacaggccatatacgaaagcctagacttgattccgtatatcaacgaagcatctcatcatttgaatcgtccgatgtcatggaaaattatcctcgcaacgaagattcatgtaacaagcatcattgctatatgtgctttatccgccatgcggtccagtctggaagtcgttggccttcaacgattctcttcctcggggctgcttttgagattcccctcattcttacaacatgccgcaagctcttagtgctacggcgattcctcgctataactaccaccgtacaccctcttaggatccaatttgatcattgttaacttgattaacttgatgacctctttacgaactaaatgtttcacttctatgcaagcattgcttttgtttgaatccttatggcctcgtgatggcctagatccctctgaatatcttttttttatggtctctaaacgacccaggtgatatttcctgcctctttctccgatattcaaaatcgggacctcacttcctcgaataccgcgctcagaacttgtgtgtatcggcactaaaaactgaacaatacctgcttattgtagtcaggcaataaagcttgttcggctaacataaaagcttaatcttgatatagtgtcactacttttcccctcatgcggggtgcggagaatgcttgtcaaaggaaagtcacgcatcggcgagtcttaaacttacacgaagaatatagtagtaaaaaggtttacgttagaggctggcccaatggaatttgtcagcattcggtagcaaaacttgaagcctagtttggagaaatcagtcaaggcagacctcgagatatgtcggccgagatatttgatgtgcctgcgagtggtacgaaaaaccagaatacatgctccaaatcaaacctgctaggagagtgtaaatcaataagtatttgatagttgatagttgatagtcgtctattcgtagaccaccggcaaggatagatagatcatagccttaatcccaaatcaatttcaaagccggtgcttgaactataccccaagtagcaaggacttggttagtgaagaccctttgggtttataaagaatggacgatacaagatttagaataccggggcataatctgagtaggatcaacgccatagatttgctcggtctctgtattcgacggggcatatcaaaggtttaaatattcaatatattggcctgattataagtagcccgcaatatctccctcccacttggagcttcctagcgattgagccttcacgaagaatctcatatttcttgtcaccctcgccatttcccatacctcaaacagttatccctctgtactcatctccattgcttgtcaccgcgatgtcagatatgacgggatcagcaacccagccaaaaggctattggctgtcctcccggcctcggcatcctcacgatgtctagccgtgctgtccagcaagtgcatttgcgcaagattccaccaggttcatattacgcctcgatcgcgaaacggtaccctgtcatgcaaaaatatgagaacaacgaacctgcctactttaccacaccaccaactcaactcatccgcgctctacacgctactctaagccagatcacagctcgacctattgctgagcgcattgccattcacggcaggcttctgacaagattaaggctgctgtcactcggcctggtctgaaacaggttgctacccgccccgagtgccaggctcacgggctgactgcaatgtacgtacctcctggtttgaccccgcctgacgtgctccctggcatccttaggcgcggggtggtatttgcggctggcttgcataagtaaatagccaatcaggataatcgatttggtcatatgggtgtcagtgttttggatacagatcgcggcgatattgagaagggtttggtagctctgacgctttgactgaggcgagacagatcaaagggatgtagggatgaaaaggtggctgtgtactggcacagtcaaggtctcagtagtagttactatccatccatcgtctgtaactcgcttactgggatcgaggaaactaccacaaacctcgacgaggcggtaacagaagcctttgtaattcctagctccaaatcgtgattctatgcatactcaagtcgatgacctacagcgctctccgttcatttctcatgcagtccgattattgtccgtcacggcggcaacggcatctatctgtttgctgagggtaaataaccctgaagaccaacggggctgtatttctcccacatcacctggcggtcacttccgcgtgctacattagttacttagtgttttgaatgatagaaccttctccctctgcgacgataaaggtttcgacctccttttttttagtttgctgagaggttgtttgtgactcgacgccttagggcgggccggccccgccgcctgggcgcgtcgcggagtctttgtcgcgtcggtgagccaaccacttacaacatacccacaccgcaaacgcccctggccagatattactgaaacctcggtgaccgctcatatcatgggcttagtgggagacttcaggaggatcaaaggacacagaagagtaagaaactaatctgatatgtcgaagacttactccgtacatattgatgaccggcgaaccaatcccacgcctccttttcaaagtgctgcatactgcaggtcttagactcgttagccaatgccaatgcatgacttgaccaccaattggaccgggtggtccgttatgtccggtgcataactcctttccgcctcgtggtagggctcctgtaaggggtaaaagaacatttgagagatcccctgccggattgatgaatccaatattcaaataaataaatgctccacgctaggaagatataaatcagagcgtcgaaagcggagaataaagagacaggcggagacgtggcctgttcactctcggtgtcttcatatattggagcttattagtatgttccccaggtacggagtacgttgaatacaacgattgaaacatatgcagtcaatgctcaaatcagcgtacggtataagcatcacattgaaatgtttattcgccaagttcctagacaagtagaaaatcgaggagacttgaacagttagaccaaagatcaagatgctctagaaagacgccttggaggtatataataaatgcagtgaagtccaaagccaagggctcggtaatttaccattaccgtcacagtaccgtggtggatctgccacggttgccctttcctctactcctctgctcttcgcctttccacctttcctcccttctccatcttctactctctttaacttgccttgtttatcctgcgcaccgactgttcctattcctcccattcacgaattcatccccccagcgcattcccccaggcgctctcacggtcaattgaccgactggaatctcctcttgaggaccttcctactggatacatcaagcttctgtagctgagtacaattggctcggctttcggtgcgcaactcaatttcgaagtgcgcgtgcgcaattgtcctaccctctcatcccccgcaactttcttcatccgtcatctttcgatcaacacccatcctccgcctatctcggttttaatccaacagtaagttccatgcaaccatcatggcagcgttgatggtactgacttacgagtgcacagctccatgactatgaacccctatattagctgggcgatcttgctcgtcgtggcaggtagcctgggctggtactacaccaatggcacaacccccaaggccaacgtgattcgagctgccgtcgagaagaccgaggccactgtagcgcccaagaagtcaaagcgcaagtctaagcctgctcccgagccggctgccgccaaaaagtctgaggtgaagaccgtcatgtcgtcccccaccaccgaggatgacaaaccggacgaggaaatcgaccgcaaggagatggcccgtcgcatggctggcctgaagaccaacgctcctgctcagcccgctcccgccaagcccgctcccacgaagagtcagaagaagaacaagaagaaggctgcacacgccagcgacacccgtgcctcctcgaccactggcgctgaggctgacgacgatctatcttccgccgggtcgccccaggtgaacgccactgttccctcggccggatatgtttccgacatgctggaggcccccgcccccggtgcatctgtgctccgcgttactggcaatgtggagaaccagcctaagaagcagaaggttcagaccttcaaggaggtggagaccaagaagcagcgccagcagcgtctcaagaacgaggcccgcaagcaacaagttttggaggctgaagctgaacgcaagaagctgcttgagaagcagttgcacactgctcgcgagtcggagcgccgcgaggctgcccgatcatctacacccgctgccaacgcctggcagacccaggaaaacattgctccagtgaagaccaacggggtcaatggcggatcccgccccgctcccgccgctcctgccacttccgtctctcagggccttctggatacttttgagtcccctgctgctcctactaagtgggcacagaaccttccctctgaggaggagcagctgcgcctcttgggagctgccaaaggtgatgacgaatggaccactgtctctaagaagcagcccaagaagaagggcgccaagtccgacgagagtgtcagcgagaccagtgcctcggagaaccactccacccttgttgcccctgcccctattgagccgcgcgtgacggtgaccccaacctacctccccgacatcttgcgctcgcgcgagaagggccacccgctggactctgactgggctgcgtgagctgtttccttcatgaagtatttctctccgttctctcttcatcttgagctgtatttattacccttacttcgtctttgttttctcttttttggcgttctgggggtgtcacatcattcaagcaccctccctcccctcaacaatggggcctgggaggttgcgcaacgcattaggagcggaattggtagattcccttgcaagttgtgcaagaggaagaactgcactgcggcaacaaaagcagaattgcgggaatggatctgacgctgtgtttgtgcaagttcttttttttctttgttagtctagctggcaaaaatctgtattgcaatgaaatcataaccaatgcttgatctaaaacaaaataaggcgcaagaatgtagagcttcctccgatattcactatagagtccctgtgtcgtcactattcccaaaacggtttagcggccagttccggttatcgtggcctgaaggtgctttgtatacaactccttggtatttgctcctgtcttgaacttcttcttccccaacctgtgaggactcaactccaatttcttcttcttctcaatctctttttgtattattcttccgccatggcccaaattcgtggcactgcgggctataatctcggccaccagaacccgtttggcgggcccggcagcgcagatgccgccagcgatcctagtccactggacgcaatccgcgagcagacaagcaagatcgaggactggttggataccttggccgatccagtgaagccgtatgtttcaatcctactctttgttttggtcctatttctctacccgcgtcgtggttcaagtcgcgaaagagctcaaaacaagggattcaaggcatgcactgacaccctgttctttcgctctctagctaccttcccgctatcggccgattcctcatcgtagtgaccttcatcgaagactcgctgcgcatcctcacacaatggagcgatcagctcctttatctccgtgatttccggaagagtaagataatgcccctgcatcccggtccctgatcggcacgacttagggtccagggtcctgcataacatcgtctaacgcgcttttttcttctgctggctttagttccgtggggaatcacgcacacgttccttcttgttaatgtcatcgccatggccgtttgttcgttcctggtcatcgcccgcaaacgcaccgaggtcgccgtcgcgggattgctcgccgttgttgtcacacagggtcttggatacggtctcatcttcgacttgaacttcttccttcgcaatctgagtgttgtcggtggtctgcttatggtcctgtccgattcgtgggtgcgcaagaagttcgtccccgccggtctgccccagcttgatgaaaaggaccgcaagatgtatgtccagttcgctggtcgtgtgttgctgatcttcctcttcattgggtttgttttctctggcgattggagcttctggcgcattctggtcagcttgttcggttttgtcgcttgcgtcatggtcattgttggcttcaaggccaagtggagcgccatcattcttgtggtcttgctgagtctgttcaatgtgtttgtgaacaacttctggactgtacgtttactgggcgattgattctatctttggttactgatggtttcgtctagctgcatgcccaccacccgcaaaaggacttcgccaagtacgacttcttccagatcttgtcgattgtgtatgttgtctctccccaataggagatatgtccaacgctaacaatttctacagtggtggtttagtcctactcgtcaacatgggccccggccaattgagcatggacgagaaaaagaaggtctactagagcagaaggaggtcgaaacgcgattcccttctctctatatatctcccggcatctgcatcctagcaaacacaacaaagagggatagaaatcaacaaggggcggcctggctggtgctccgcgggctccgagcattcagatacgggcccttttcgacccttgactggtttgcagaggctatgcatggctgggttgggcgttgtttgcatttgggatgattttgaaacgccgaggagatccaacgatctactcgttattgcgtcttttcttttttgggttgttctaccccgcgcttttgtgtcctggtctcttctttcattgagatcgaaaacaatgtcctttgcatatgatgtttttgatgtgcatttgaattgcatctatcacgaagacaaactgaatggaaaatctaacgctgattgcgacgcatatctgtattgtcctttgcttaagactcaataatagtagcaatggctacgtctaatagaaggcatctagtaatattgagccgacttctgtccctctttatatatgtctctcttgttgaccattgtcaaaacccctatatgttcctgtgcagaattttacttgctgaggaagtcggactctgatgtatcattctgtatataaaatctacaatctagacatatgttgctcatatttggttttataatacggatatttggacggcccagatctaaatctagatgaggggcagcagcttctagagatcttgtataagaaccaccgagtttcaagaaacattcaactatatttacactaacatagtattcatctcgccgattaaatgtctaaaaagagaaaaacattcattgctggtcaaacgctatgtactggtggtaaccctaacagagagggagtgattatggtacaaggaagagataacatctaggaactaaagcaaagctgaaaagatagaaaagagaattccgcagggccacaaagtgagggagataaaggagagacaaggaaaaggattgtgaaatgataggaaggagtgctgtcatgatgaactcgcccgttctcttacggctgtaatgaaacaacgctgtgagggaacagcagaggaacttttgcaggatggaggtgcatttcgcttttatataccggaccagccaggtacattcctatgagggatctgagtccgacagcgagaggatgagtgtttgctccggtgttttctccgaggcagatttggcaaacacggaaggagtcttggaaaacgaggtgaaataaaggacaaacaaggacaaaaaatgactaaaaagcagatgctcactgggcttgatatgcttcaaacgccgtattgctaaacccggagaagctgatgcgaggggagatatggcgttgctgagggatgagtgttgtggaattcgcgttcgactttagatgtccatgctccaacgccaggggcggataggctgcaattgacccagaccaacatcatcgcggctgtcgtcgttgatctctaggtgtagcatgtggaccttcttgttgtcccggtggactgtggagagagtcttcgagatatgtgggcggtaggtcttatcttcatctgtggctttcgattgagggcgagatgcaggggtgtcagggtatttccattcgaagcttggagagtcatccgagagggtcgtggagaacatagagtcagttcgagagtgtaaatctgcgtctggaacattggagtcgatacggagtcgagtcaacgacggtcgacgttgttgatggtgctgggtggtgtcatcgacagctccgtcgccagactcgctgttgattcgttcagtttcgttctccctggccacattcttgggaggccgggatatgttaccacaggcactaccacgagtcggcgaagtgacgtcggctttaccagccatcactcgggcactcggtggtggctggagcatccatctggtctcggcacggctacacggtccactaacaatgggcgggtggaggtcgttcacaggcggcacgcgggcgatgtagtacttggaggtttcgttcgggtctgcacgaccgcgtccagagaatccaatggacgatccacgcacttcctgttgtccccaaagaggctcatcttcgcgttggtagcgcattgatttccacttctcgccgagtggatgcatcaggccagcactcttgtctttcttgagttgcgagctctggtcggtagtgcaactgtccgttcgttgaacagggcggtgaccaccccgacgagctggaggaccagggccgagggcgatttcttcccgccagcctacattggtactgaacggggttggttgtgggaatggacgaggttggtcggtgattaattcgttgttgcgtcgctccttctccttttcccgctgcacccgggtagcatcatttctacgtttccgacgatcgaggttctcggcgcagggggtgcaagtggcataatagaagaccgcggactgagcgccccgatagagccacatggctggcgcggggggggtgagtggggaagatcggtttattggggcttgttttgtggctaagagtgcaccgtcgtggacgacgggctatcagcccgtgaaatctgttgggattgacgcggtattcgctcgttgtgttgtagtgatactatcggacacatgaagggctgagcggataggggggaaactgcggaaaggggcgggatggcaaggtaaacgtatgaattggagatcgcccagcgatctgtaggctcaagagagggtaaaaaatagttgggagagagggggagagagaagagagaagtgagatgaaatgacaattaggggaggtttctgagggggcgtcgttagtttctgcctggggtgtttcgctttgagttgatattttttttcactgtttgcggcctaacctgggtattccacgttcatatatgtcaagatatatagacaattacaattcaccgacttcttctaaatcttcaaacaagttacaccctgcagtatacacctcacattgtcacaaatagcctcctaacttgctgcgccaaggccgacagggggctgaggaccgaggcgtatggggtactagataattatagagatcgaattgaactacggagtaccctgtccggagcatacaatctataacatcactgcctagttctttatctctctctctctttgtgatccttttctttcttgctacgaggatacatatgtactccgttgactccacaccgtatgagaccttggcatcttcccgcgtggagtcgagcaggaatgtggctgcaaacggtagattactcctttttgtagagaatgcagaagattggaatggtaattcagtagattcacattcttctggaccgtaggggcctacatctcatacttgaaagaggccaagtagtcgcatccccgtaaattcattgtctgtgccatcgtctgtgctctgggccccccgcaaaagtcattcgaggggcaacaatgccgagttgatggtctcatatgtagccattgcatcattgcacatcagagtcggatatgtcaatgaaatcacaacccgtgaaagatcgctgtaggttcgcagtaaataatcaatagatcgacattcaacagcgtatccatcgtggtaggccaagaagcccgcgatggcgaattcaatagtaaagagccacacgcaacgctggcaaactccaagattcttcagcttgctgaatcgttgtatcgcatgcaaatggtttccttaaaacgcccgaaaactgatggaaaatagcaccgtgtatgttgtaagcccccgctcatgcattcttcgtgcctcggattacttcgcctttcaccttagaccagtcgatctcgctgtccattttctcgtctatttcaccacacaccacgacattgtcaccgcggatcaggtacagcccatgctcaatctctgtggagggctcctcgtcgtcgggagtgcggatgatgcgttcaacggtattggccaggacaagattggtcgcttgatcggttgacaggagatcgccgatgagtgtgcggccgtcaacggtgaggatcaggactttttctgttcgatcgagagtggtcagcagttaacttctataggaaatggcgtatgtaggcactctagctaatgtagaactcactattgacgtaaaaatggagagacatgttggatgggagagcggttcaaaaaggtgaaagggtatctcaagtttgcggttgatcgggtctaggtagatgcaccgctgaaagatgtatctcgagcccgctgatgttcctgtcgctgggcctggagtagctctcttgctttgcgtgggctggaggaggttcgtgggatcttgtcacttcgcgcaaaaagtgctcgtcgaggtgaagagccggattgatcgcggttggttgtagcgcgacaattttgacttgccgaggatcctcaagctcgcggacggaagattcaatctgcaggagctccgtttaaagctcgaggccaatcaaatgggagttgatgataatggcgcagagcgggtctgtactgttggtcgaatcgcaagtaagattgccagaatcctagatgataacaataaaattctagaaacacgagagtcgatgacctcgactgatagcaaagagattggtggcagcacgtgtcttggggcttcatggttgttttccaggattgtcgattgacatccccgattcaatcacgtgcagaagcttgtaggagagtggataccacaacattttatactgttttatgagagatcaacgcgtttaaggtggaaaacatgggctttgttgtacaactgagctacacaatgagctacatagatgactctagtgtaaaaggatttatgtatagcaattcactatgtgtgcacgatatcgcccgcaatttcccatgcactccaatcagcctcgcaaagcactcagatccaaaggaacactgctgccccgtccagcgcggtatcggcggtctccaccgataaagtgccgtggtttggggagtagcccttcagtttggaatttgaatcgcgggtcttctattcggactgggccatgtccttgtgttgaaggactttgtgcgcctactgcaggcgatccaccattggaaagtgtatacgcgctagggtccagcgatgcaaatggttcgtgggagacagggcgagaggaagcaggggatggtcgggatggcggctcgcttggcggagctgcaggaagtgaaattggaggcggtgggggtggagcacctggggcagctgatgggggtggtgggggaggtgccgagggcgaagaatgtcccagggcagaacgtgcagcctgcgcagcaatcgagggggctattgaggggggaggaggaggtgtcgatctagaagcagccggcgggggaggaggtgcccgacccgcgggggctgatgggggtggtggcggaggtccggacggttttctcgatgtaggcggtggtggaagcttgcctggtgctggaggtggaggaggcgcgcgtggtggcggcgcttcaggggcccttgtagctggcgctgaaactgtagatgatgatcgtgaagcaggccttgggggaggcttcttcaagccggcaatcaaaggattgatcggtggcgcaggcggtacatcggtcgatgatggacggggaggcggtctgactccaggaggccggggagctgttggaggcttgggggctggcgcagcaggtggtcgatgtgccccttcggaatcggagatatatggcgagtcacgattggcacctgtatcgatacctccacgactccgtagcttgggcattccaccagcaaataaacctcctaattgaggtggcgttggactggatgcaccatctgtccccgaaaccccttcgctgttacttcgtaatcgattcgcggctggaccggatggtacgggcggtgcaagcccgcttggaggcggccttgcgccaggaacaggtggcgcacctgcgactgggggagctgctgagacgcctcctgaactgccgattacaggggctgatcgatcattggtaacagccttcctcagcctggcgcccttgtgaatatcagaaagaagtgcgccctatctataggttagctgccaagttccttaagcgacaagctgcttgcggtaatgaaactgaagcacccagtttacctacccgatctttagcctgtcctttgggaggcctgcctgggaggccacctggagggggcggcgggggaggaccgcccaaacctcccggcggcggcggtggcggcgggggaggaggaggtggcatagttggggatcagataatgagagtatcagatagacagtttcatataatttagaaaataatcaggtcaggaagatgtgttcctggaataggaggaacatgacagagaagtaagaagacgtcagggtgcgagtacggggaagtggacagcgtcggggcgaagtctccgcctggactctcccatcgaaaaaaatacggctgcctcacaacgtcactcatcaccacagccatgaaaagagttgttctaacagccaataagggctcccagccacagggctcgatctgtcaattatgtcagttctcgacttcaacgccccgtcgtggcctccctatcgcgcgtctccccaccgctcgcgcaagtcgagctgcgacctccaatctccgtttacaaccctcgaatcgaaccgataggttgatactcggctctccttcgcttattttccgtcgatatgcttccgctgcgaccattaggataagcccagaggatgcaatcaaagagattgcgcaggatgcattggccgtacatcaatcaaacgcggcggcctccaacgaggtggtgatagaattgctacaaagatgccagctggtcgccaaatcccttgtcttacaggaacgggatcaaatcgagggatcatcaaagggtgagggcaacgcggtctcttctttactagacctggaggagaagcaacctgcgccgaagaacaaaggcaaaccacactccttacaacatccggacccccgactggcaaattcagtcgcaaaaatcgccgttgacctcttgaaggacgagaaggtcttcatttcgcccgaagctctggcctcctgcaccgagaccctgactctactgcgacgggccgagcacttccccgagctcttccacctttatgcctacaagcctgtcccagaagagggtagctctccggtgaagttgctgaaagccaatcccaagagtgtcaacagcgccgttccggcggagctggctaacatggctcttggggttgccattgcacagaaaaatctctcgctcgtgctggccatcatcgataatactttctgcgcccccgccttccaccgtgcgaagatcttcaagaaagccggcgtcccgctggctggccttgcggctgccccggctgcttgctatgctctcgcatcgtgggccgcaacattccagaacacaatggatccgagcgtagcgactgggattgcgtttgccgcttcactggcttacgttggcggtgcatcctccatgggctttttggctattaccacggctaacgatcagatggaacgtgtggtctggattcctggtatcccactgcggcaacggtggttgcgcgaggaagagcgcgctgctatggatagagttgctgttgcatggggttttaaggatccttatatgagaggcgaggaagttggtgaagagtgggaaagtcttcgtgagttcattggcatgcggggcatggttctggataagaccgaattgatggaaggcatggagtaacttgattccctgcatgtgtatcataagagtctcttgtttcacacataatgagcaatgtaacatacaaacctaagctttatctacagctacattatactggtaagattacgatagaatagcagattgagaccgatcatgagcttcatatttttttaaagtcgtgagactatgagataaacccaatactcaggcccaaactagaaaacaccggcgcagttaagcgacagataatctagtagacacggtggggaggggacatggaagccttgatgacaagactgccaacgttctgccagcccttcttgaggagggagacgaggtagttgatggcgagcatgaggttggcaacgagggcctccttctccatctcgacgttgccgatggcaacaccgaggcacagaaccttcttgagctggaacttgatggtggagcggacgtcggtgaccttgacggccatgtcctcagcggcggagacgggggtagggaacttgccggccttggacagaccgggaccgaggagacggggaatctgcttgatcagaccctcggaagcaaggaaagcatcgtacttgcgagcaagcttcttgatgagcttcttgttcttgttgagcttcttgagatcgtcaacggacatggcatcgataccgtggtgcttggcacggtcaagatcgtgctgatcaccaagaacactatagattccgtccgttagcttctatgttctttcgaggtgtatacatccttcgccgccgcgcatcgtgggatgtgaaagattgccccgcgggacgagttgtcgatgggaaacgcaccagatggccatgttggggcggggaacgctgggcagcttgatggtgccagagaaacgcttatcacgctggggatcgtagttcttcaggccgatctgaagctcaacggtctcgttgaagttacgcttcttctcattgagagagtagttgagaaggttctcgacattctggcgcactccggctgtaatgagaagagcagttagtggcaagatcaagtagagaatatcatggggtaagtcgtaccgactgtgatcttggacatgattgctacagtcttccaaaagaagttaaaattctgttggtatggctctgcgctgaatgcttgagaaaagaaattgtcgagggccgtgaatttctccgcttgtgggtgtggacttgcgctagtctagattaggattagcggtgccctagatttttgtttgctgactcatcaaacagcctgaggcatgaatacgaaccgatttccccaacctcggcaagacctacgctgtatgacggccacggatacttcactcaatgcaattccactcgctcatactccgtacaaataatcgcattagcaagcgtcgactcggcttgtataaaaaataatatcgagaatcctaatccctcttcgtattgctcggtcaggtcaacattgctgctgtttcaagtaaccgccggccttgcctagtacgcttttcctgttactgcatttggcaaaacttccaatattagaccaggtgaggactagttagtgcaaataatggaacatcgatcttgcttgtcaataatatgtcgggcacacacgaaacgaaagcatacgaagaggtctggacggatactaaattggtgattccctcggagaattgggattaaagtgataaattgcccagataagaagcacgcaaacttatatttcaaggttcaaagctatatacgattcatgtaggtatgtccattgtattttatagaacgtacggcatactcaggtagaagcatcgaccgggtcgccccgccacatagccgacccgcttatatcgatagatcattactttattatttatcctatttcattgttcaagaaagtgtctcgttaattgatatttctttgtgcagcgatagcagtaagggcttggatcggatatgtttataaataccttgttttcgcatatccccgaagatcgatctagatcaaccacaagcacgagtccgtattaagcaggcacaaagtagtccagctgagtagatacatcattttaacaggcggtggtatctgatattaattatcaaatacgtatacaccacctaaaaagatcttcaagactcctcgtcatcggcatcttctgaccacaaacaatatatatcgaatagtccagatgaccgaccaacacacaagcttttgctaagcagacgggtatataatacagcaacccacaaaacgagcaaataggatgctagatcatctattttaggacagttctcaactggtgaaacgaacttgacatggtctgcgggggctgcatctgatcgcagcgcttaaacgtgaccggcggcagtgtcagcctcaggactggtcacccaacccccctttggcgtcgagggctattgccttgtgtttcgatttaatttagacattcccagtgagattagaatacttaaacttgactttctgctaattccttttgtgatatactccaggtttacattctatggtcaaggttgtttacacctgggcatgacttggcttgacttaatccgagataccccctcctgacttggcagctgatcttttgaccattggctattgattttttttttggcttatttacagaccaccttgtttggctttatcatgtcttctacaacagattcgcgcgagtcaactgcaccgcaggattactactcaagtcttgacgatgagggcccgcttgtggaaaagttcaagaacatcgacgataagacgcagttttaccttgctatgcgccgtctacaggaccctcttactcagaatttcgtgctcgatttcgggaacgatgaggcatggtgtgcgtctgatctggacactaacgaattgaaacggttgctgagcaagccggtaagtctttttcgaagattagacttgagtctatccaacagtaaagggctgacatgatacagagagacaagtgctttggtacacggtggatgtaagaatgaagtcaaatgtagacgagtatatactgacattgtgatcacagcaatatatgggcaccagaggagcagaaggaaagcataagggtatgttcaatttcattcgcatatgagcagtattgactgaccatggattcctaggcgattaccaaatactatggagtgtcagaacggctacaggggatgatgtgcacagagccagtggatcctgcacccaaaactacacctgtaccaaacaaaaggacttcgaaatcgcctattattgagccgtcgttcgagcacgaagtggatgacccggagaatgcactcaagcatctcgccgatccagataaatcgcgcgagtcggcgtcattctcgaatctcaccttcgcacaagtcacgaatcaaatctggcacttctcttctgtggatcatggtcctcgatgtaagtacatcgcaccaaacccgagtgagcataaacattaagaatctgttagacacatgtatcggctataatacgttgtatgtgattcccacactatcacaaccgaatggccaagatctcccggatggaaaacggctttggacctggctgatccagtgcgatgatggtgagcatcccatttttcggatctcgagtgcagccgctaacttgtttgcaggcacaataatttcaatccaagagaaccccttcccgagacggaaggcagtgccaatagatgaagccaagccagtcctcgacatcgtgcgcaggaacatccgctttattttcgctggcgtttcgagacagcactttgccatgtccgagagcgagtcgctgattaccatccgagtgcgacattttagtgacctcggaccggatcaggccaatatcaagcagaaggatggaccgagtttgctcttctactatatcttcgatgactgggtgtcaagttatggacttatcgcaaagcgagaacacaaatatggggttgctttggagaaattggtcagtagtgtcgggaaagcacggttgtgttaatgtgttccgatggctaaccccgcgcagagaggccaaatgctcgatcgtccggttgtagatttggtaaacgaattgcactggctgggccgacgactcgcagttctcaaacgattgtaccagagctatgagcttatcatgcggcgactcttgcaacggcaacgcatgctccgcgacgaagcgcgttcgtctcaaccagccccggtttcgtatggagccacctttagcgacatggagtatgtagatatgcgccagtcgagtgtcgtgagcgatttcactttccatgatacaactgataaatcggtcggtgtgcagctgagctcgacggccgtggcgcgtttcgaacggttggttgatcggatcaatctgtactgtttgagcgagattgagaactgtctgaatgagaaagagtctttgacgttcttggtgagtatcttcccgtgctttattccgagaactctgctgacgtggcctagaatttcaacttaattgcgctcaaagactcgcaggctgttgaaaagctcactcggatcactattctgctggctaaggcgaccattttgttcctgccggtcagcttgatgagtgcgtacttttcgacggaactcgttggagtcaagaatgggtacaccaaggcggattactgggtcagtttcgtggtgatcttccttgtaaccatcttgctcttgaccgttttcggttacgccagcgatactgtcgaaggcaggacgatctaccggtccatgatacgaacattcttccgacggtctcgccagagaatgtcgcgacgatcagaagaataagagaaattggctatgacggcatgaagaaccgagagatggggtggaagaaattacgcaggcacgataagtgtgggaaggtcgggcctatcactcggcctatcagacacggtgggaccttttcctgagggtcttagcccgggggaactccctttggtatttcatttacggggccaacacggtgtcctctttctaggaaaatataccttcccgaatctatagctagttataggcagaactattagagtcataccatatatagtcgaccgaatctaaatcataagttgccttcttcatatatctctcagcctcattttctcgacgttgcgtgctctccagcaaaacgggtgacaaagactacgcccaccgccgtcggtctgcgtatttccacgtattcaaaacaaaaacgaaacaaatttcacccttctgacttctcttcgataattcccctgaacttgcatctcttgagactccttaaacaacatttatactcttttctgccggtaagtggttgatccggttttgactggctcgtgcccagacttaccccccttcccccctggatctctgaccgacaagtccacaacacgttttccaacccctccgcttctcccctttcaactacatccctcgatatatctctgacctatccactcctcccaggatccgagggttttctcgctaccgacaatatgggtattactttctcgcggttgttcgaccgactatggggccgcaaggagatgcgcatcctgatggtcggtcttgacgccgctggtaagaccaccatcctgtacaagctcaagctcggtgaaatcgtcaccaccattcccacgattggttagtccgcccctcgacccatctatcggcgacaccgtgatgcgctcttcgcaatttataagccgtataagagacattcaaaacccccccggaaactgatgcctagtgcaggattcaacgtcgagacggtcgaatacaagaacattcagttcaccgtgtgggatgtcggtggtcaagataagattcgtcctctgtggcgccactacttccagaacacccagggtattatcttcgtggttgacagcaacgatcgcgatcgtgttgttgaggcccgtgaggagttgcagcgcatgttgaacgaggacgagctccgtgatgctctcctcctggtgttcgccaacaagcaggatttgccggtaaggacttggattgttggaggatgtttgctagatgaaatggcatgctgacctcccccgcttttttttctagaacgctatgagccctgccgagatcacgcagcagcttggtcttcagagccttactcgccgtgcttgggtaagtgtcgtcccccgatttctatgttgtttacaaattcactaaccgtcctagttcatccaatccacctgcgccaccactggtgacggtctgtacgagggtctggagtggctcgctgatgcgctccggaaaaccaaccgcgattaaggtctataatgcgaattcgaatcggacgtgtagctgggtgaaggagaataccgatatctgcgaatgatggattgatgatgacgatggcggggagttctttggccatacatgacattgatctctgcaaggaaaggttctgcaactggttcgctacttcttttgatgttctctcttcaaacggctctttttcctctacgctatgctattagcctcatttgtttttcttctctccggcgtcgccactccaaaattacttctctgccttggaaccccagagatctgtataagttctcaaattgtaaaatctcagaatctcgattgggcaaggagagtgtgagagaacacaagaggaacaaatgagcaaatttcgaagtttcatctgctttctgctttcttatcttggcttgaggcctgtagggctcagtcggactgagtaaatttcagtccgggctcaggtaccatcacgtgatggattcacaagggtctgacagtcattccaatgttgtttttgttcaattcttatgctaaagtatggtaaagaagtttctactttgcttatgtctagccatggactttaagattatgtgggacaaaatatacatcagtaggatccacatagttagggcttatgtggacatatggagtccccggatctataggacaaaatgcgtataactgcgtgaacgaatgcttcaaacatacacagctctgactgccaaagacattttacaaacgctcagtgtctgcaggttcctggtatgaccagagtttcgtgaacaactctttctcttcgtcatctttagccaatccgatgaagatgtctttgaatttccggctattcttctgggctgtatcgtagtctttgggcagtaccatgccatccaccggaagcacagatccatctcgaaatattttcagtaacttcccgacaccatttatattctcctcttccttggaatgaagctcgacatcctgattggtgaaactgatcggacatggtacagccgggacgagtttttcccactgagcgaagagcgacgtgagtgactcgcgaacaaaaaaaagatcgcaattttcccacactcccgtgaccagccaaactggtttccggatgatggggatctttttattttgaaggacagaccagtaacgaggcgatagtctatacaccttggctaggtagtacttgtgaaggatctgactctctagatcgtcatcgatcttgcgttgttcttctgcacttaggctgccaaagtcttccggtctttcgggcacgacccagccttcttgaagaggcccacggtgggcacacatccttgggacatcggcatggtagaacaacggtgcaacacacgctgattgccaatccacgatacatgtaatttggagggtctttggatcgacgaagatgttatctagattaagatcggggtgcattagaacgtttttgacgccgcgtcgttggatgctgtttcgttggtagattgaagaataagatagggagcaactttcatatatttggtcaaaagagcaagaccgtcctcgggatgttcctggcttttgagtgaccgataatagttcatccgaggaattgcatgtgacttcatatacgcaatctcgttgcgccccaatgaacgagtgtagtcactgggatgcttccctatattagaaagacgaccagaagcttttcaccagcctgtcgattctcttgacttacatggaccacgatccaaatccatgccactccgtaccccgttccacaattcgccagtagtgagaggtcccatggcaaaaatatcaagggtgctggtcgtagcagactgaatgttggcttctttaggttcctcgcctagggagcgaagatcatccttgaagtaaatacagccgtgcatatcaaaagtcacaccagtcagagtgttctgaatgtcaatcatctggatgatcaattggagctttggatctcgagaccattgattccaaacagagcctagacaaacaccgggcgctttttcttcaataatatactcggccccgacatgattatttgcgtcaaaggacgatgctaggactcgaggaacagggagcttcaagacgtcggaaagctatgtaaattgaattgtaagattggatatagcaaaaatgaccggcagaattacttactaacttgcgtgtagcgatctcggaagtaattgtgaaccgagcagccccggtgttaggatttgggagctttgccaaaacttcgcaaccgttgtccattgtcaggataaatgccttgttgtgtaggccttctgcacattttgtgactttggtacctaatgaaactagcgtattattacattgcaaagtcctaaggacagcaacgcacaagattgagctccctcgcaaacactaatggcaacttgaacaagttgctgtaggtcaaactccacataacgtttagagagttctttttcttagttgaaccttgaaattcgagccaagttaaaattcattttcctaaagaaaatgaactgcgtagcttacagccaccggtgtctggtgtatcggtgcagatcttcctcagaaatcctctggtctggaggagagataatcaacaattcagggcagatcacagtgtattttgaatataattaccttgaccatgctgtgtctcagcatagagctcaggagagcagtgtcgtctgcctagacgagacgtggtgaataagctcatattctgagctcgggagcaaggaaaggcacgtgctcgtacacgtgtattacttttccaattgatccaacgaattctggaaataattcgcattgtcatcttgtagaataaccccggcgagtgtcatatcaaggtgcgatggggacttggaagggggttaaatttgagcacgtgctgacatgcctagtgagcctcatacaaatccgatataccaaaccttggaaggttacggagactcacaaccttattttgactgtgcgaggtagttctttccatttatttcgcgtgccttccaaatttcgattcttactttctatcgcatgcagatctattcaatcaatggaattacccacttcgtcacggccaaggaaccacgtttgctcgtgctttatgcggagtcgagacctgttttaccgtggccaaaaccttcttacagacacttcggctgtcctacgtagctggtaagtgtttgtgcaacatgccaagctgcagagtctatgatcgaacagtcgcgcatacgtggccagcgagcaaattatcctcgaagcccaccggattccgacctacaaagtttgccgaagctaacgagtatagtggcgtctatcgatcacacgaagctagtgcgggtctacatacatttcctcatccctctagttccatacaaaatgcagtctaagctctacgagctcaagtgggacctaaaaaagccataacaaatgggactatcgatcccatcgtcttagcttcaacgtatacgtatactttcgtggacattcctccgtttactggcaacaagctatgcaaagaactatgtcctagctcatgtgaagaagtgagacggggttgatgagtgctgtggtgcaactaagtctagggctggtcatgggttgaccatggaggtttaagtattttgcaggatgttacgtatcaaagagctctctagcactggagtatagagctatggatatgttcaatttcatcaactacacaagaattgtcgccggcagcctcgtgtcttttcggtagtcttcacagatattgtttttttcccccccaaatccagctaggtaagtatatgcgtacaagacccataaaaaggcccattaaatacacctagaaaccaaaatagatttaaaagaaacaagacgcaatctccagggctgatccgctcgggcttggaccagtccattttgaggacacaactgcgtaatccctcatttcttggacagcgccaacagtcttggcacttttaactgcagaaattaccgacttgggcccttggggctgcttatcttctgtttcgcatttgaatatcgtctagttctaggcagtttcgtctgttttttattgttttactgtcttcacctccttttagctcttttatctcttaagagcgactccggaccaagccccattgcctggccgacgatcaacaacaacacagctcatcgcgtgcctctccctccgtccaacaaccacccctgatttgggcaatatcgaacagatttttctatcgttacacttgttagatagatgggctggtaatcgtgtgattttggacaattaactacctcactcattcaatgttgacatattgtctggcatcatgactgttcaggcgaggagggcctccgcagcttacaaggccccatcaccatataatccacgagatacagacatcgaaaagcaacccgccaccgggcgccacacctatcaccaccaccaaagcgatgaccccgatactgaagacgagttgctggacgataacaatgtcgcggaatcctacccgccgcccatcgtagctggcggcagtcttcgccgcccccaagctagcgttggctttcgcgtaccccagcggatcatgcgctggctctgcttcgctcttttcgccgccctcgtcgtcttcatcctcaccctcttccgctttaccatctcctcctccgtctcacaagtcgccgtcgacctgcccacggtcggcgccccgaagccgccactatgggagacctttccgttcctcactcgctacgagggtggtatctcttccttggttccgcgctctgaaaatatacccgagtaccctggcgatggctccgaggacctgggtttgcggacggacagcgacgagcagaaggcgcaggcgcaggagcaggatgccaacaaggtgaccaagagggatatgagcccgaacatgttgagtaatgtgttcaatccttatcctgactaccaatcgccggaatacatagaaaaacatggcgagaagcgcgagtgcttcctcaatgcggaaaacacgctacggattccgtctatccaaagctaccccggaattccaaagggctttccagatccagcgataggttcgagcgagatactgggtattcgggacgacatgtgctttgatcgatttggccgattgggtccatacgggttaggatacggggctaagaaaggcggcatcggcgcgggcatggagggccaccgtgagggtgccgaccgcgtgtgggaggatgtcccgccggtcgatttccgacaagtggattgggctgctgcgcaacaccgttgtcacgcggctaatcgccatcgctttaacgagctgccggagccgcgtctcaaccgctttgtttctatgcctgtaggtattcctaaggtgaacatcccgccgcctgtggaagacagccgcaatgaaccgcccaaggttggacctgagcgtctgccgcgcactgcagtggttatccgcacatggcacgactttcactataccccagaggacattatgtacatgcgctccatcatctcagagctctcgcttctgtctggtggcgagtatactgttcacttcttggttcatgtcaaggatacccttttgcagatctggtccgatgacgagacatatcagcgtgtgcttgatgaagcactaccagaggagttccgcggcatggggactctctggtccgagccacagatggccctgatgtatgccggattggaggagaccatgactcgcggtctgccaatccacggtgtataccgcagcacgtacatgcctatgcagtacttcgctttccagcatcctgagtacgactacttctggaattgggagatggatgcgcgttacacgggccattggtaccacctcttcgacaaggtcggcgaatgggcgaaaaagcagccacgaaagggtctgtgggaacgcaatgctcgcttctatgttccgtccgtccacggctcctgggaagacttccggcagatggtccgcgtgcagaccgaaagcggtacaaactccgccaacaacatgtggagcgccgtcaagggcaacacgcggagtgcaatgcaccaacagggcgacaagtccatctggggccctgagcgccccgatgaacaggatatcttcgaggttgagggtgagggtatcccgcctacgagcatggataaggaccagtaccaatggggcgtgggtgaggaggctgacctagtcgtgttcaatccgctctacgaccccgagggcacgacctggctgctgcgcgacgacgtgacaggctacgacaaggagaatggcatgccaccgcggcgcaccgcaatcatcaccgcgtcgcgaatctcccgcaaactgctcatcaccatgcaccgcgaatgcagcctcaagcgccacagcatgttctcggaaatgtggcccgccaccaccgcacttcaccacggcttcaaggctgtcttcgtcccgcacgccgtctacgtcgaccgccgctggccgacccgctacctggattcagtgttcaatgccggtcgcaacggagcttccggcggtgctcgtacgtctatcttcggcgatcgcgaacacaacttccgtgggacgacctggttctactcagcgggcttctcgccgaacatctggcgccgctggcttggccttcgcgtcgacaatgacggcggtgaacagcaagagctggctggcgagggccgcatgtgtctgcctcctatgctgctacaccccgtcaaagaagtcaatattatcattgacgacggagagaaagtagaggaccagtgaagaaggagggagtatatatttctctcagaattggcttcgattcgtttcttgggtgtccctcacaccctctcttcctgccatctccaggattcatgcacgctttggggtagatgcttatttgtcttgcattggttctcataattactgtataatgacccttcattccccggtggcataacgtccccacgttttggattcccgtttctcaatttcggtgcgaaaaaggcgttcgcatggcctggatggccgggctatggctcacgatgcattctggattttcccttggtgcttgaccacttggtctagtcattagaggtgctagattgcgttctgcatcgggagaattttgtttttgcttgacctggactggatatttcagaaggacgagacggacttcttccagcgagggctattttggttacgaattgtttcttgcacataatttatatttttggttttatgatttattcgagtagaacatgggatgtcgctagagatacaaatatgcctatatacaatgcaattataacttcaacccactacttctactggtcaaccctggtcggcacaaagcaaatattacactcataaaccccatcctcgtcaaccccatatgtaagacaagtccgacacacccgatgcccacactcggtaaccaaaatctccaccctctccccgtcctcaacacaagcatgacagaaatgcgtcggaaacctaagcggcggattctgaaccatacgccgctcaatctcggaagcgagttcctttcccttctcgacgcgcgcacggaggagcgcggcttttgtgcgcagtttgttcatggtagatttgttgaaggggttatcggcttcttcttctgacgtcgtcgggcttgtgttgggcttgtgcagggtcggaaatggttcggggacgatcaggggtcggaagcgttcgcatatgggtctgtctcgcatgcaatttcgttcgaggtgatagcggcggaggatttgccggttaaggaggattgtatagaatactatgaacgtttgccaggcgcgccattcggagactgggtccaaagggagggggaggagggttgagactttgctgggggttgttgtcttgaggcgttgggtttgggtttgagttgaagacatgttgaagttgattataatatgtttttttttccttctgtagttgagagggggtttatagcgaatagatcgaagtattggcttcacaagcctagcttgggctcttttgcagagagatgggagaatgtagaaaattcgccggccacgagacccggcatatcaatagagattatatcgatctatccaccccagaaccaaatatgcctctatctacatagcactgattggctatatcatgactcctgtgtcttctcgtccaagcaattctagattcggtgcataaagcattatgtccaggtataccatggatgtagctgagcgcgaaacgcggattctttttccctggcctgcgatatcggcagacattagcgtagacaaccggttccttgaggtgtaaaacaggttgagtctagatgctgtcaggttcaatatttgccattgaagtggcggaaaaatatcaattgggaagtgacgattgcattggtctagaactatcgagtctctgggtttgttgatattgaatttcttctatgttgtcgtgtttcgcattattttgatttctttcatacataccaaagggataagagagcaaagagaagagaaaaagggataattctaaaggtagatgctgtctcaacatgaaatatttccaactctgttccagagtctccagttttttttatccactctgcgatctcgatgcttttcttcagcatcacctccatctgcccgctcttgtatgcagcacaggtccatcctcagtctcttgtgtaggaatgggatgttaactccctattctctgctcttcttacacccttatcctccaaattgcccacctcgacgcattcccaggatatgaccgaaacccccctgaaatgaaaggtatacaaatactcgaccccagaacccgaatcgatactcttggcggatatcacgtattccccaggaatagacaccccctctttcctctgccgacagagcggcgtcaactcccagacccggacaagtcgatccgctgacagcctatccgctaaggccgaccatatctcaattcgggaagtggcaatatcaaatcccacttcagccaagcgcatgatgaaccgcacattgtcttgcccagagtgttcccctccagtcgggccatgtgtctctacacagacatactccctatcatatgccgggctagtcggataccgcgggtaaaagcctagagtcccaaaagatgcttcatgtccattagcacctgatgtatgagaggacttccaagtcccatgcagagcacgaaaaatagccgaggctgcagccttctgtgcggcctcatgaccagggagaagagcgtcgcgcaaagcacctagtgtcctatccgcctcgctctctgtacctggagttggggtattgccataaagatacctcgcaggaacaacaggtccagaccggccgtcgcctgcttctagtgccgagcgactaatctctagatccttcgcgaacgactccatcaatccgacgtagtcgcccatggggaactgaccacgggctagatccgggtgtgccgatctgagacgccgaaggttttgcttctggtcgtctgttttgcagagcgcaccgttattctcctcactccataatttcccaaggaacctcgcttgcatctccatcacgccccagtacgggccgcggtagaatccgacgaatccggcatcgggaatctccgagcggacggtgcctcccttgtcgagaatcaacggtgagaaggggtccgtcttgcagtattcaagcgtcatcaacacttcatccggtagcaatgatagggacttgtatggcgtgaacccggtggccatgactatcaccgccacattgtctatcgtcttggtcttcccgtcgggcccttcatactgaactgaggtttgcttaatatctggatcagaaatcacagcagtcacccggcccatcgatgtctgaatcgctccacacctgacgaattcggcgtaatcattacctatggcgacccatggtggctgggttctggattcctcggcaccatgtggtgcatccatgtgcgcgtatttctcataatcactgccgagcaaggtgtggaagtaactgtttgttttgactgctttttcttctggaatgggtccgaggatgtagtctattggacccgggggtcggcggcctaggtcgtacatggccaagtctaacggtaagaaagatggactcccatcgggagactcgtgtgggagatacgtcggcaaagcccagaacggtcttgaatgtatatgatgcacttttgtctcttgtgtatgtgggactctgtttgtggaaggtgtagatgaagattgccggagagccacagcagatgcagcttcgacgcctgacatgctgccgccgatgacgacgatctggcccttcacatcgttggattcattagagagcgcctgctctcgttcataatggagcgaagagctatggatgattcggccttggaattgatctaggcctggtatgtttggaatatactgctgggcaaagtatccagaggcgatgacaatcacgtcgaaatcttcagaagatatcccatccagtaacccaggagtttcctccgcgctatatagtcagcatccagctcgagtacagcgacacgcgagtgagcaccaacatacctttcctgaacccactgaacattccacttcgggtcacctccacccccaaccctccgtatagttcttatcactctacaccctagcctcaggacatgagctggaacataccgctctgcataacaggccaggtattctccaacctgtctcgcctgaggaaaaatcggaatatccgcgtcggggattaccgactcccaggacagatctgaaaaagcgactgagaagcggctgaggttggtccgcatgcgagggtctagtgtaaccggggggccattggtctgattgggagagtgatggtgacttgaccacagacccccgacttcgttctggctctcgaagatgattggagagaatgtcccgctcggaaaattatgaagaagggttttggctgtgactaggcctgaggggccggcgcctgtggaatgcgatgttagtgtaaggtcgggtataccatctgggtatagagttgtatccgcggggtctcgactctagagtctggactcaccgatgattgctactttcttgggtgacatcttggggttggatgggaggtttgcaatgtacaagatccctatgttttgtttgtctgatgtgcttttcaatataacgttggaagtaacaactcggcagactcgagctgttgtcgctagacttaccccgcttatatccacttgggaaacagctcgggtttctttcttttctatataaaccgtggacatgtaatcatttgcatgtccggagtaatcattttgaatacgatgtcgtacattcgaagttgtataacatcgacaattagtaacaagtctacgatagtcatctagttaagcacaattcgaaccagcttcatatcgccacacccacaacgggcgtaattataaccccttaattcaaatatgtatacatcgatgtaccttgtacatctctttcaagttccaatacgccaaaaaggcggagcttaaggctctcggcgtgcataccagcaaatcatgacgttaacgccaagcataaccccagcaaccagggttcgtgaattccctcatggagcaaccacgaccggacaatttcctggcccccgaaaaaaaatgcaacttgagcgccaggactgaatttcccatattggacgcgtgctgtagggtggcgtaagagttcgacaaaaggtcgagaaaaagactagcggaactctatcgtattcgcatcgctcgtgctcatgctggtgctcgttccatatcggtttgtgtgcagatggtactttcagactcaggagactcgccgtagccattcagtaacttggatattgggcgagtgtagattgggcctgtatgcctcgtcgcattcttgttcggtgaccaaggtatcgacatttctctcggtcaaggggactctgtggtggttctttgttcggaggagttccttttccgcgaaggaggatggcgccagctttgagagtgtgtctcggaggcgtttgatgccactggggaaggatcgcggtatttgaggtggaccaaatgggttgtcggatctccatgggtagtcggaagtcacggactggacgtgcttcttaggagacagtgttctcgtcattgcttgcgacgttgggaggttgagggagttcgctgtaaatgatttgagttggaaggagtagggattttggtcaagtacgatataagcaattattatttctggccttgtagctaattccgcgggacccgcggtgttgccccgtcgtagtatcatcggatccctggttgtctatgctggtcattcatcacgcagtagtagttcgctagtcgccatacttcccccacaaatgtgtcgtgggtcatgatcggcggatgcagatcaacttaggctgatcaactatgtactattggggctcaccggttagtatttgacacacaaacaatggctgtacaataaatatctggcgaacgtactacgtcatggagatgccgatcaaggcatagttttgtagactgtcccagggaagagtcgcagagatggtgttttctgacgaataggaattgaataaatgaatacataaaccgtctagggtcataaggcgtggaaagtgtaatataaatctagcatataccagtatactacttcatgttcaattctcaatcgctacttaataagtaaatcggaaactgggatgatcatccccagcattctccagctcctccctgggccaatggtaacggtgatctctcttgccctgctcacgcagccgattttcacggtatacataaccaaagaacacaatacacgccacacctccgatccatatcatccctagactaacaccgaacccagttctataagtcggagcctcagagtcaaagaagacattgctagcgaccagaccgccacagttaccaaagccgatctgcatggccgaggcgatagattgcttgtaatgcccagccatgttgttactcacccagcccaacaagatcggctgcgccatgtatcctccaccggtgatcgcgtatatggcgaagtatcgggcagcgactggcaccaactcctgacagatgagaataacgtacccaattgtggcgatgacgcatcccaacatggtaaatgcgaatcgatggcggagtcggtcgctgatgaaggctgtagctagtgcgattgctgtcgcgacgaggtagatgggaatactcatcacttgagctcggacagatgtccagccgagctgtcggaggatggtcggggcgaagaatgatgttgcatagcctgtattgacgattccaaagtacataatagcactgaaagcgactaattgttagtggaagctatgtaatatcggcactcaagcttacccaagatagatcttcacatctgagaatgtccgcttgatggccggcttgtcgaagcgattcatttgcgcttcgccgcggtcgtccgataggcgccgaagtagcaaagcacgctcttcctcattcaggaaagtagatgtttcgggccaatcgacgatgaggaatttggcagcaattccagtgaatactgtaagtaaaccttcaatgatgaagatccagcgccagccgctgtatcctccgacaccatccatctgagctattccataggcaagaagctaggagaatgatttagtgtagaatcaactcatcatgtaggcaatacatactccactgactgcgccagccagaatgcttgcgctgaagaaaatgttgaatcgccattgcaactcgtggcgcttgtaatacatagcaatcaagtagatgcagcctgcataatattagtacttgtgttatcaagtcagggatcaactatccaacctggcatcaatccagcctcaaacaagcccagcaagaatcgacatgcaacgaggccaccaaagctctttaccacaccttgacatgtggtaacaacacctgatatcatcgaggtcagcccatgttccttgatcctatatcggttcaaacataccccaacagagcatgatcccgctcaaccaccaagatggcggtacctttttcaagaagagattgctaggaacttcgaaaaggatatagggaatgaagaagataaagagggcgatgttgtaatcatgtccctccatccccagatctttctcgagaccctgaatccgcgcgttaccgatattgatccgatcaagaaaggcaagtaggaataaaaacatgagaatgggaacgacatggatatcgagcttccgtagcagtcgtttctctgcggctggatctatgtccggcacggaaaccgcggacttgacatcctcgaccgtctcctggtatattttcttctgctccattttggatatttcagatgaacctcaaattgacacaagcggccaccaggataatccaaaatatggtagagcaatagccccttttatatacgtttagtgccagtcgatataccatcgcatctggggaaatccggggaatccggggccccgcactacaagcccgcaccgcgatgttgtgttgattcattccgcgttctttgatcgctgtcggtatttgattccgcccctaggaatgccaagaatccccggcttggtgtgtagcttcgtgtctggcatgttgcccgccgggtacctggtctatagtcactgagtatgtatttgatcgcaggtttgttgatggctaggcacttgcgaacctattcacttggtcagagggttatagctcgaggtcttgatattgtatatatccaaagccatagtccaggagcggggtatacatttgcaatttacgatttggggtggcgttgaaatataaagttcgtggccagtgaagccgaccctatttatgatgacggaatggaaccgcatcatgccgcatagagggctcttgaatacgatcgctcgatagttggaataaccgatatcaatatagccgaatatcgaattcaaatctaagctaaggtggctagaattgggccttatcatgctgaccctctcacgagccgacattcttgcgaatagttggctccaatgagaacacctgcttatccgctgcaacatccttgtagactatgtcccagcgttcttggagctcccgaggtgtttcccatgcgttttcagggtctcgcagccagagtcgcaacaaatgacgcctaatgtagccatgccgttagcacatccatacagcaataatgtatacgaacgaaaagaacatactctttaccaggctcatctttaaatccattccgcgcatggaaaatgctaagattgttcacatactgcacatcacctttctggaaatccagagtggcactgtgctttgccgccaagaagtgcaaagcgtcgagcgcctcagcttgcgcctcggtgataggtgggatatccttcgatcgaggctgagccaggaatccggtgaagtatcgtcttgcgtattgaatcagaaccctctcgggggtagtggcagtggctggttggtggtatagaagtgggcggaggctgtagggcctggctgggttattgaaactaaacagtgttaattttaagtctgcttccttggcgcttggtaatccttacccatctactggccaatcctgggacagagtgtgaatgagatcaggtctttccttggccaggatgttatacacattccagctgctagcaagatagctttctcctccctctgcggcgcggttcagacagaggagtgagattatatcgccagcatcagtgtggaaaacttgcttgtcagacgtgtttgacggggctccgataagcttcttgtcggtcgtgctagtgaggtctttgatatgggatatcacgggcgagttgccatccgccagtcgagcttcttgctgccgtcctcgaatattgccgatgtgggaagatacaccggcatatatgatgatattgtcttcccgggaataattatcgatgcgcaacccccggagaacgacgaatcctcgaccggtgtggatctccttcgaaaggtctcgaaggacaggccgcagggtaggtagaggaaaattcgactgattaatatgccccgaggaaagaccaagagctgttaagtcagcaatgggaacttaatactgtggtcaaaagattacttacatttgaagctcttcaaagcagcgtcgagttcatctagctgatcatcgctcaactgataaacccaatcatcccgcttctcgacgtcttttccttcccagactagtgacgataccagcttctgtgggaagtctgcaggcaaagtggactgcaggtcctcagtctcctttcgccgacgagtacgctccttgtacttttcataatcaggatgatactgaatatcgggctgggtggccacagtgatagtctgaacagcggacatatttgttatgcagaagagaaataacagatgtcagatgaaagatccttggacaggtttatctttggtcacccggagtgtggtcacgacatcaaccccgcaaagcgcgagataagtcgaacaacacaggagaaccttacagctaattaccaacttcaatcgcgtcaatattcgcaattatccggaagtgacatccatttcagattcttattttgacctttctgtctgtcaatatataatcatagggagaaatgggttcgatttgaaacattaatttgaaatataatgatccagtgtggtgtaaaggtcggattatgattatcccaccttaaccaatgtatacaggatgtctgatagttgctcatgtcttttcaaagtcgttgaatcaatatagagaccatcaagcttgtattgcggaagggattgcgggccggaggcttgggacttgaggaattaagtgaaggataaagcggtgctattaggcctcttgcatctagtagaattatgttaaatcaggaagctgataatatatatttctcgccttctcccattagatcgttcattcaccaaaaaccgtggtagtagatcataatcatctctaattttatttgctcaaagatatatattaagcagaaaggtaacagataaaacgagattcataaatcgcgctcggcgcgcttgcattagagactgctcgtaacattttcaaatatcaacacctaattgatcgcatatagataaattaacctagttccgagtatgctcaacagcaacagcaccaggctgcttgctttcttcgtggctcatctgaacccccttctggtgtgccatcacctcctctccccgagcaacatggttagcaccgccaaatagaatatcaatctcctcaaggggaacctgcttggtctccggaataaggaaccaaacgaagacggcaagtaggaagttaataccggcaaacatgtagaaggcatagaagccctcgttgtcgaggaaaagagggaagaattgctgcacgatggcgttggcgatgttctgagtctgcgatgccatacctacggcctgtgcgcgaacgttcattgagaaaatctcagacgtccagatccatactgttgcgccccaagatggtttgtctgaaaatgatgttagtgaagttccgtttgcagggaaatggtaagtagaaggaacttacagaataagatgaacaagaacagaaggaacacaatcgatataccgacaggctccgacttggctccattggcaagttgtggtgtttctgtttcgacggcggagacaatgatcatgcagagacccatgccgataccaccgacaatcaagaggaactttctcccgaatcgatcaacaatccagacggcgttcagggtgaagaaaattccaaaggtggcgttcagagcgttgatcagagcaatctgactgtcgctggtaaacaccttctggtagatcttggtagagtatgagttgagtgagccttgtccggtgatctgttggccggcattgagaaccagagctagacccatgcgcttgcggagagacttgtctttccagagagccgagtaattgctagagatagcttccttctcgtattcgatagcctcacgaatctccagcagctcttgctcgacttcctcctcggtatcacgaactcttcggagagcttcacgggccttctcgatgttgtttcctctccggatatacctagtaatggtcagaattgctcgggccaatcgaaatcgccaacatggacttaccaacgagggctaccggggatagtcggcaggagggcaaggatcaaaataggaaccaaaagctggaaaataacaaccaatctccagtcccactcacccagctggggaacatttttagtgcaggcaaagttgatccagaagcagatgaacgatccaacagagtagaacatctgccagaaagtcatgatcttaccacggatctctggcggagccaattcaccaatgtagatagggcccgcagctgcaaaaacaagctgtcagtccccgtcattgaaaccacaggatcaacaagacttactcaatgcgataccctggccaataccaataatgcatctaccggcaaggaagcaggcaagatcgtggtgaggagcgaaggtttgcataaaggtggcaataatgactaaaatacagccaatgcccattccaagtttgcggcccaggaagtctgcacacgggcctcccaggaagaaaccaccaaagatagcaccgaccgtgtatgctgtattaattgagccgattgtcgacgcatttgggtggttcatccaagcgagccagttcttggaaccctggactgagttgaatacagatgcatcgtagccgtagagtaccatacatgatgctgcaacgcaagagatgtacctaggaaattagattagggtatgttcagcggattatatgactgtgcaccaaccaattgtacgctctcttacgggtcattgaaaaagtcattctgatgatggcctgtctgttctaacagtgtgatttgagatatagaaccacactgcaatatattttcaacttctgtgggcagtgacagacgaacaactgttgcccttagtgtgagagaacagttaaggaggagctacattccagggggtacctgagtgggcgaaggctgcagctatataagaaagtacaagaagcgatcagggcgcgttccgggggtagaaaatacaaccccagtccatgtgagcaggtggatcagaccatccccagaatcaacaaaccccggatgtgccaagagtgcttttggcatttggataacggggagccctcggctccaggatcgctgagtggtgggtatctggggtcaatggcacaagggcaacgcatataccacgcctagtcgatttctcattggctttgaaaattctcacatgtgcgggccggacctggggtaatggacatctggggttcgaggatattttcaagcttttgttccggcgagatgaagttggggagttttccacgaataggcgggctggacgacagtggcttaggagaaagtcaagtccaccaataggggaaatggtaaaggacagtatatttaaggcaaaaagggcgctaaaataaacaagtaggagatacggggtacataataagcgactgcccaggtagttagacttctggggttcttttaggctggagatagggctgactttatccttataaagagacgtggagccggggcaaccttttcttatgttctgctgataatacattctttggcatctctatttacagagtttcactagaaatagattgaataggctaaaaatgtgaatccaagctaacaaggctctaataataggctaaagacactctggcaaaggaagcatgacttgagtaatccgtagaaagattcatagaagagctttggggaagctctacggagtaatatatgttgaattgcttttctgtaagaacagaccaatctgccttctatggataatcacctaggagctgcgcgcgcatatctgcatgtataaaacctgatcgaactatcaatgtaacatatcaagatatttccatttcctcctttcacttctagaattaagtatcagtccgaaacattcgcaattcctctcactttcgcctgtaagtatacatatcacgtgatctcgtgatttttcacaacgcgatccgcgacagcgaaggtcccactggtataacagtctcaagctttatttttctttgaacatattttcttttgtctgaatttgctgtgacctacctagatatatgatcccggcactctacctaatccagccagttctgttattttgactacaagcaatgccaccccgcaaatcgaagaaaaagcagacgcgacttgcctttgctgcttcagccgcttcgccttcggcggatgcgagtccggagagtagccgatatgcaacacttacatatgatcacccaagcttgggcacgtaccgtcctccaaagtctctcaacagcgagtcggggacttcgcccgcgagcaaacgtccgaagctccccgccaagacgaggtctaaggataaacccacaagtacggtgatgatctatatcctcaatgctaccagaaaactaagatgcaaaagacgaactgttcgtagagaaatcgagccatgaatccttagacgaaacaatcatccccgcctcccagaagaggaagcaagtcgcgccacccgacaacctcgacccggtaaatctcgatgacgcccaagaatcgaagaattcccgctcgcgaaaatcacaacaatccttggaatgctcaaagacagatagcgagagcacaaatggttctgattcggaggagctttcccggccgcgccgatcactcaagcgaagggccccaagctcaccgattgactccagcgactcagatgagccagtagcctcttcggcccccaaccggcgtaggtctacccgaggtggccattcttcaagctcgcctgttatactcagcggtgattattcaaacgagtcagtggctccttcgaccgccaagaggcgcagggtagcaaggccagccgtagtttcagaacgtgatgaagttgactcggacgaaccattggcctcctcaccagtgaagaggctccgacgtggaaaagcgaaagaaagtccccaagccccccacacccccaggcacatctcgcagcaggccagacttgatattgcagaggatttggaggaccttcaggattcgggtaggaaccaattagcgtacgaggctcgtttatttatgctgatgcaatcatgcgtagttgttaagaaaagtcgaactcgcggccggaatgtcgaatctgcccgagacaaaagaatgaagcacctcgaagctttgcgccgcagacgggctggtatgaaagatgaggaagaggaacaagaagatgaggaagacgacgatgatgaagaagaatccgatccagatgtgcaggagattaaacaaccctctgttcgtagcctctggcgacatgacgacggtgacagcgacatagaatcagccattgaccccaacgagaacctcgatcggtacgaagatgactttgtcctagaagatgaggcgaacgaccttggcgttcccaccgaggagctccccttcgagtttacccgacatgcatataagcagccgaaggaatacttccgcgacgtcatcggctggatggtgcaaaacaaactgaacccggccttccctcgctctgacgacatgtacaagatggcattcatgaagctggaagatgaagtcaagggtcgggccggttcacagctgatttcttcagtttggaaccccagtttcgtatatgccctccaggcccggccgcacatggaggtcgatacctttcctacagaggataaccatccctgcgatgcttgcaggcgctctgggcatcccgcgtctcgagagatgaaactctacggaaaggcgtattccctgcaaacgttagagccactggaagatgacagcgatgaggattccaataacgacgacgatggcaatgatcgggaccgggatggccatgtcattcctcctgagaatgtccggtactacctaggaaagtaggttttgtcttcagacacccattcgatcgagtccccctctaactgtttcttttattttaacagacaatgtaatgcgagagcgcagctcacccacacccttactcactggcgctaccatctcaatgaatgggtcatcgacttcctggagcgtacgggccacatggatgccgacgagatcctccgacgaaatgatatgagcgtcaagcgtaagacgcgaaatgcaaatgatgtccttgacagcatgactggaagtggtgaagtcgataagttgtggcgtgacttccacattaagctcaagtctgcccgcgagaaagaggtatgttcttgtagtggggtctcggtgcttgatgctaatcgggtctgtccttcatttagtctatctacggatgatgagatgatcatatccaagaacaagttcgagggtcagtatttgtcctcgaatggctttatcatgaattttcatgaagtctgaaccttgtcactacatagttttgtggcatcgcttttcttttgcgaagtttctccggtgctcctttcacaatgataccctttttttctttctttctttgcacatttctagtcaggtatgtctagctagcctaccaaaaagtacctgcaggttcagccagctatctcaagaaactatattcgcccaagagcctactgagtatctatctccaatgcagttttaggtattcgtaggcctataagtatggctgggattacaatttgcgaagataaccaaacccatccgttttcattacctggacatgcacatggggagagaaaaaaaaaaggtgtataggaaaacaggaagaaagatgattggggttgtacaaatacatgcatgcataagctgccggagccaaaatgtcagaaagcatgagagatgcgaggagagaaaaaagggaaaaaaaaaacaagaagtataacaaagatccgaacaagtcaaaacaagacacgaatcgggaaaccaactctttccgagtgcttgtagtcctatattttgagatctggccaaaataggtgattggaaatcccaggacgtgacagaattttgccgacgtgcgcctgggtatgctgtctgcaggagaccaagtgtcgcggccggtaattgtgtcactgggtccttcgccaatctctctgctttccgaagtggtattaatttacagagtaggttgagccgtcttttcgggttcggagccggggatgagcatctgcgagtaggaatcataattagtatatcgtttcaaagactgagagtccgccgaagagcgcaaaaaatgccattcgatgatagtgtcgagaaagagaaatattatggaagattgccgagatgcgaatacccgaggcaatgtacacggtgtcaatagtgccaatgacagcacgaatcggggattcaagataactgttgcaatgccgaaaaatccggagcaaaaaaggtgaaaaagaagtaaaacacatacctcgttagctcccttgatcattccctgctcgcgctccatctggatgtactgctcctcctcggcgtaggccaaagcgaatggcacaccgagcaggaaagcactggtgctgataatccagagggccttgccgctgaacgaaaaggtggccttggtgaggtttgtgatggaagagacggtgctggagacgttgcggcgggcggatgggggaacaatgtctttcagagcggcgatacgctcgtagagcgactcagcctcgagctcgatatcttcctcgtcggagatctcggagtctattttgcattgatgcccatgttagatacggtactttatgttgatttcagaccagtgttcatttctgggtttcgatgtcgcattgttgaggattgggattggggactgggatgataggaggaacttcagggagcagaatatcttcccatcaaagcgattccccatgcaaatgacaatggcgcgatgcgagtttcgtctgattatgggcgttcgggtttcggtactaaccagtgtctgagtagtcatcctcatcatcggagaccaaaagagcatcgtgtttggtggcagtgggcttatcggtgaagtgctcgtcttcgacttcagtgagcttgaccattttgggcggtttgggtggtttggatgagaatgacgaagggggtctagttaaaggtgatggttgaatgatgggaggacgctctggtttcgctccgacttttttgccgaaaagcggcgaggagcttggacccaccgacaacgatgtcatttgttttcgatcttatgaattacattagttagttactgatgtttacatgaacagtcttttggtgggctttttagtagaaaggtgagttgagaaaggccatgattttaaaagagaggtgtattctacatagtcgaaatgctggccatagtctataattacagattaccacatgacccttatattcgacgcatccaagcgagtcctgaggcatagaatcatctatttaccgtcggccaagcttccaccgggcaatccgttcttggatctcctcccaggggaaggaccggagcttatagccttccaactcgccctcctgcagcacaacagtaggcttaccagtgcccttaccctcattgtggacatctccaccaaagaccttgcgagctacacggcggaggtcctcgacggtgagggcctcgatctgctcacacatctctcggacactgaccttgcggccgtggacctgcacctggcgtccaagatcctcaagctcgaccatgcgagattctaggttcatgagcagcgaggaacggagctggttcttcgcacggttaacttcctgcgcttgcagcgagctgtaaccagtgtccagagtcagggattgcagctcgcggcacatgacctcgaccatctccgtgatccgagtcgggctgcaggatgcggaaattccgaagattccgctatccgtgtagctgtgattgaaagcaatacagctttcgacccaaccgtgctggttcagcacgttggtgtagagtcgcgagtacataccctttccagggccaccggccgagaatgagccaccaccaccgaggagggtctggagagtagcaagagcgtagatatcaggcgaggagatggggagagcctcgaaggcaaggtggatgtgactcaagcgagggagcatggggctcgcggggggaggaatcgaagggagggcgataaagccacccgtgtagtgagcaggttggcggaggttgagcgcggatggctcaaccagggatgagtggagaggctcaactgcagagctcttagaggaagagagattcttgaggaaaggaagctttgacaagagcgaagagtgtgttttttgagaagcagccggactgctgattgtcgatgagggcgtgaacgaaggaacggtcggcacctggccttcgtgggcggccgctggggaatcagacagtgtggtttcgattccgctgccagaaagtacaggacccttggtcttactgatgtcactcggcttcatgtcgccaaagtactgctctgtgagctgaacagcctctgcatgtggcactcccgcaaaggcaaccaccatccgatccgggttgaagaaaagctccctgtaccgctctaccactgccttgttgatttcgcctagccgttcttctgggcacaatagcggatttccaagagtgttgttggcataagcagtcatgtgcaccaattctggaaggatgagttccggcttcgcccagatctcgcctatctcgtactccgcagttgcgagctgttggataacctcctcttcagtgatgaggggatctcgaatggtctccgcaagcaggccgagcgtggtaggaactgccgagttgaaactggcagactggtacatcaaggattctcgagatgaggcacactgaatgttaccgcctagggactccagaatctcaagcatttcatctccagtgcgcgccttggtagacttgaaggctagacggtccataatgtggctgactccgcgcagactctcatcttcgtagcgagatccagcatcgacgtaaactccgacaccagcgaagggacccggtaatgattccgtggccacgcggactccatttgaaagtgtggtgatttgttctagctcggcgggatcctgcggagaaagaaatagttcgtcagttacaaatgacgctgtgttgtaggacctatcgaggctctcttaccttgaccgattcattgacggtagagaggcttcttgacacggcgcgaggagctcgtgtcaatggcttcgcggactcgatggcccgcaatgctgtgcggcgcatagtggttctgtacaaatccaacagcctgattaattcgggatttcttggttgcaccgaatatatccggtaaaggtgtgatgtagctcggacggattgtcggcgaagaatcgtaatcctcgatccaaaatgcttagctaatccgttgcatggtggattcttacatattctgttgacatagcagatcaaagtgaataactaaatacttttatgatatttttgacaagaagcggtgttttactgattttttgacatcattcgtgactggcgtagcagggagtgtctagtccgcttaccccagggcatgacctgcagggctcgaatatacaccaaaacacatggacgtggaatctgaatggaaatttgcagaacaatgagtcgtcaagttttctatgtactaaagattaaataactaagggtgttccgaagcccagtttctataccaatctagacatgaagcattcgcaacacttgcaccaatcttgatgttaagcccacacaaaatctgcttaacagcattctccaccttcttgccattagaagtcactggaatatcaggacatgcgtcaataataccagggacatggcgcgggctaagctccttccgaattgtggactgaatgcgtgccgcgagatccgccggcatacccgactcgttgccagcagcaagccggacaaacagaacgacggtttcatcggtgtcgataccatctcgtctccggccaatgcaaagagaatcttccacctcgtcggcgaaatgcttgagaagaatgttgtaaatttcggcacttccaaatcgcactccggatggcttgagtacaccgtcgctgcggcctagcatgaccacacctccagtttgtgggttcaagcgcacgtagtctccatggtgccagactgtgggcccgaacaaatcgaagtagctcttccggtacttctccaagcctgttggtcccgggggccagaacatgactggttgggctgggaagggtgtgatgcagacaagatcaccaggttcgcctgatgcgctgatatccttgccagcatagtcgaaaaccgagatgtccatgcctagagagcggcattggatctctcctttgtaaacggggagaatagggcaaccggaggcgaagagagagaggatgtctgtgccaccggtgatggaaccaagcataatgtcgtcgtggaaagaggaataaacgtattcgaatgtcgatggtgccagtggggatccagtactgaagatggcccgtagggacttcaacgatactggcctatgggcatgctcgcgcgggttcaaagcagcttgttcgaggagagagaggtatttagcggatgtaccgaaatgagtaatttgaagctcttcgatcagtcgtggcatggccatttctccctttccgccttcagtgtcaaagggtcggaagggtgaaccatcatacaggacgattgttactccactggccaagcccgataccagccagtgccacatcatccaggttgtcgttgtgaagtagaacaagcgatcacctggtcgaatgtcacagtgaagaagatgctctttcttgtgttgaagcaatgttcccagagatccatgaacgatgggcttgggggcgcctgttgtaccggacgagtacaagatatagacaggatgatccggtctcaagcttgcaaactccaatggtgcctgggggttcttgacctcagacaataaatcaccgtagacctttgctttcccatttgcaggtcgaaggtcatctagattttcgtcaagttccggagtagtgataagggacaccagaagctcaaggtctggcagttccgagacaatctccgctaccttcgcatgtgagctgtgtaccttgccattgtagaaggagccattgtccgcaaagagaaccttaggttggatctgcttcaggcgctccaatacagcatgcacaccggtgtcaggtgacacaccagtccagaatgctccgattgaggctgcggccagcattgccacgacggtagtagcatggttgcctacgaagccagcgacacggtcaccggtcttcacacccgcttctttcaaggcgtttgcgcactgtcgaactcgctcccgcagctccttccacgagatatattcgcgagctacttcagtggcgccaatcactgctatggaatcttcatctggcgagctggcgggatacagaagattctcggcgaagttcagagtgctgccttcgaaaaatgcaggtctagggaatagcacttcttttgtatccagtacctatgttgatcggattaggatcggatagctcaagtataaatgggaattactcacctgttcgtatggattgtgggcattgattttcgtatagtgccagatttcctcccagaattgagctggctcagagacactccatttccagagcgcatcgtagtcattcagtgacaagccatacttctcgttcactttagtcatgaaatcatagatctgggttgtctccggggcggagggtcgccagagctccttggcctctggctcaacgatttcgtcgatctgagacatagctatgaggtttgttgcagtagtgcgcgcaataatgccaggaattgaacttcggagtgtggagtgtggagtatgtctgtagaaatgccgattgagattgaaatgtgctcaatctcttgtcacactagaaatcccagacaatgtagcaattgacttcccagcagacaacgatttgatagggcttcacagggtcaatggtcaaagcttgcagtcaaaagcgagttcacacaatgcaaataccccagggggatggcggggcgggaatgatcgggtactgagttgccgatctcctcggctacggggaagataatttctcacaaaccgccccggatatgcattgtgaattaaattatgccgaaggccgaatcttcaggtcggtcacgtttagaagtgacggcctcaggctccaaggttgccattgccgtttccgatcatgattcacgtcacctccatggacatcgggatgtaggtgtcacggaccttgaaaatggacatgatgtgactataagggtttttagtcggatatgccggatgaaccccttatttcataacatgatattacaatagatggacaattatacaacgtctacggagtagagatagtattgctgttcacaatccaatatttatgcatcatacgacttgatttgtctctgtaacttgggtctttcgggtccgagactttttcgagtggaaaaaaaaccccctagtattgcgctggtaatattacatccgcactagcaattatcagccaatcacacgtaattttcgccgtactgcatgcgtttttaattaataccaggaggtcactgcataatgggtgcttagcatgggaaacacggaggtctcgctcttatttaccttctcagactctctccttcttcttcttctccaaccctatactcggtaaaggtgcttcattatctcggtttgtagtgcaacggaaattggtcccttcgtcatccgaacgtagggctctttgccccttcgtgcttcttgcccccattccacgtgcatccgattttttaagccctttcggagtattcggctcccgctcacgtcaaatcaaccttgcggtacgtctcaatctgtgaagctgatgaccggcgagtttctgagtcggagtgacttgggaacggagcatggctcagagtgtcgcatcgatgcctggtccagaacaatccactaattggctgcggtttccagattgaacacattgcctgaggttgccacgactttgaagaccgctggagtttccaagaacacttgcccagtcaaacacatcgattatcaactacttccgatagtccctgccttaactcgtcaacatccggacgcgctcaccccaaagcgcccctcgatcctgacgtgagaaaaaaaaaagaacacccgtgccgaaaccttgcgctgtttcctcttgcgatgcctcgtcgatttagcaacaactcctctaccgacacctctaccaacccgccgtccttttcaccttcttcgggaaagggcggtatctccactaagggccccacggtcaagtccaatcgcctttctcagttattctcggcctcgccaaagtccaagaccgaacctgtgcagagtgggcatcctcaacctagcaattcttctccgccgataagtttggcctcactgtctctaccgacgatctctctatcaacagccactgcggacaatccgaacatggacgagctgcctacaacactcttccagcctccaacccctgaggaggctcgtcggctggccaagcaacatgcccagttcggtcccatcggtcatcctagccaccgatactccagccgacaccccggtggtgtcttcccggagccggtgatggacgagccgccgtattattacctgctcaccacctatatcagttacctaattctaatcgctttcgggcatgtccgtgatttctttggcaagcgattccgcgaggaacactaccgccacctcaagcctcgcaatggttatggcgctctcaacagtgatttcgacaacttctatgtgcgtcgtctgaaattgcgtatcaacgactgctttgagcgccccgtgactggtgttcctggccgtactattactttgatcgatcgggctacggatgaccacaaccagcacttcttcctgacgggtaccactaccgacactttgaatctgagctcgtacaactacctgggtttcgctcagtcggatggcccgtgtgcggatcttgcagaagaatccatcaagaagtatggcattgccgcacccagcacccgagcggagtctggcacgcaggatatgcatctcgaagtagaggatttggttgcccggtttgtgggcaaagaatcgtctatgattttctccatgggttttggcaccaacgcaaccatcttccccgccttagtctcgaagggatgtctcctgatctccgatgaactgaaccacgcctccatccgtttcggtgctcgtctctccggcgcctccatcgctatgttcaagcacaatgatatgaaggacctggagttgagacttcgcgaggctatctctcaaggacaaccccgcactcaccgtccctggaagaagattctggtcgttgtcgagggactgtactccatggaaggttccatgtgcaaccttcccggtcttgtgcacttgaagcgccggtacaagttcaatctgttcgtcgatgaggcccactccattggagccattggtcctaagggccgtggtgtttgtgattacttcagtatcgatacctccgaggtggatatcctgatgggcacacttacaaagtcatttggtgccaacggtggctacattgcagcagacaaggtcatgatcgacgcacttcgtgccaccaactccggtgtctactttggagagtctcccgcgcctgcagtgctttctcagatctcttccgccctgcgcatcatcagcggtgagctcgttcccggtcagggtgaggagcgattgcagcgattggcttttaattcgcgatacctgcgtctcgggttgaagcgtcttggctttatagtgtatggccacgacgattcaccaatcgttccactccttctctttaaccctgccaaaatgcctgcattctcgcacgagatgctccggcgcaagatctccgtcgttgttgttggttacccggctactccgctggtctcgtcccgtgctcgtttctgtgtctctgctgcccacactaaggacgatcttgaccgtgtgttgactgcttgtgacgaaattggcaacgtccttcaattgaagttctctactggtatcgcgggcggtgcactgcctgctgccgaacagccggctcctccgcccgagctggagaaggaatggcaccgcaagcgctcggacaatatttcacctccacgctggcgcgtcgaggatgtcatccgacgcggagtccaggatgtcaagaaccccttgtactagtactagattggcttccttctcctcccggttgacatgacgctgtcttgagttcactaggctttgagatgagtcttcggtcggggtctttttccacaagcacgggttgttgctggtcacaccgtgccggagtcttaatcccatgtgtccccttgctctttgttctgagtttatatgatttttgtgactttcgctggacttggatcctaaggcacataaagcgagtgaatctcctcggactagaaagaaaagagggactcggggggaaacgaaaagatgagttattcgacagcaacgaatgaatatgccccgtctcctatgatccttcttactcttgcttcttcatgtttgcatccatacagaatttcatgttactttctttgtcgctgttatccttctcaagatattgcctaataatgttccactattgcctaatattgttccattcaatgctccacagggagaagatagctaaagaagaggatcttaaagactagaaagaccgctgaaaagactactaaagagtaccatcttcttatatgtacctttcatatgtgaatcctaacgaaaagtacatcttgcgttggaactatgttcaaaggtactaagcctattccaaaacgtcaatccggggaaggcccattcatatacttccaccacttccttcttcacttcttttcctttaaccatcttatctctctatttcccagtactcacttcgatttattgaaaacaaaatgtcttctctgaccaatccaagcctcgccaagtccttacgccaatacatgcagtcaaccttccgcattggccatggaactgtctcccctcgcagtctatacggcattcaagttcctgagttgaaagttgccttgaatgaagcctaccactataaaatcggtgcaaacgaatttgaccctgacgtcgtctttcccgaggttctcaccctcagcaaccaactctctaccatcctacaacaactcacacccgcccaagagaccaagttcgaaaaccatatcctacattgccttgctagtatggtgtacggatccaacatgatcgagcgcgccgggggcgattccgacagcacatttggcgctgtgtacggcaatcttcctcggaaaggcagtggaaggaccagaagagatcgaagaaacgaaggaagagttccagctaccgtaccacaaactgctaggagacatttccccggccttgcgcagttaccgtgaaattgcgcaacacgccagggctgcctcctacatcatcgttcaactctgcatacacgaccaagatctcagcgaagagatcattctccaggctcatagaatcttgacgtacaaagttgacgctgaaaccactccctgggaggaatacagtggtgtctatcgtacggatgaagtctccgccggcctacgtccattcccgcaccacagcatcgtgccattcaaaatgaagggaatggtccgcgacctccattctgatgttaaagaagctattgctaaaggaacactcgaccctgtcagcatagcctcgaaatacacccacgtcttcgttaatatccatcctttcatcgacggaaatggatgtatgtgtcgtttgatcttgaactctatgctcctcaagcttggcagctttcttgcgtgcatcggtgggacagaagaggaacgcattgtttacatggaaatcgccagtaacggaggtgcacttgaagatctgtatggagatcttgatgaagatgagaaacccgtaatgtataaggagctagggagtcttgttctggagtatgtcaaagagagtatgcaaaatctggttactacagtgctttcgtgaagtgtcttaagtctgattttcggtgttaatatttttgtatttctatggaggttttcctgggcatcgatggatggagtgtattaataccccttgttgctagtcaaatgtcactatttgtaaacctgtttttgtattcaaagtctggatcactaactaagtactcagttctgaatctcttgtataatcacccttctggtatcctcatctgcagactgcatgactgtttgacccctacaatcctcgatatccacactcgcacctttatgaactagataccgaataacatcacctttcttaagagccacggccgtgtgtaaaggagtttccctcataaaaggaaacatattcctcgaatattgatggtcttcatacataagggcattaaaaggagcaccccgatcaacgagcatttcgacgactttaaggctgtcagactctcgatagatcgcattatgcacaagctggcctattctaacatcaccaccacgacgtaggagaagatcaatagttgacaaagcggcgtatctggcagcataggagagcggggtattatcgatgtcacagcgcgtattaggatctgcgccatggtcgagcagccatgttgtcatctccgggtcctcgagcgcattgctagaacgagataattgttattcggctataagcttttaaaagagaataggttgtctcacgcaagaataggcgggtccgttctactcattgacgtgttgatatcccagccgttattgaagaagctggtcaagatagtcttcgctctcgccttgacggcttcgagtacgtagattggcgacacgggcattttgtgttggagtagctcgttcacgagatacactttgtttgacctgatggcatcaatcatgacctcgtagaaatgacggatatcgcaatcatcacggatggtgcgatcaaggaattctcgtaactgctgctcgctaagtcttggtagctgctgcactaacaagagcctttttgctgggatcgggggaggagtttgaactcggcttgtgtaaccctgttcaagggtgtgatgaacagacatggttgaatacttgaggtgtagagaaacataacagaaggaaagcaaagcaaaggtactgcaaagaatgatacaggaaggtcaatatcccgtgactattgtagtatcaccatggtaaaaaaaaaagcctgatcagccctgattaatacatgtaagttccataactcccgtgcaaacagaaaaacaaaatcagtattcgtcagtatcgagaggtggaaagagagctccaagagagatatctgatggtctcttaactaaattatatacgcacaaatccttcctgttttggcttaaatgtcctaagctaagcctatccagaacctatgtataactttagatatagacactaaccactgatagaactggaaacaagtgttcagtccggtcaatgcaaatggtatttctatcatgctgagcttttacgcttttatatcaggcgcccgggtcaggccagaatcaaaacaaaagaaaaaagcaagtcgggatcgttccacaagatgggagagatccttctgaatctccaaacagtaggctgtgaagtgcccaaaaaaagaaacagggagaagaagacaaagtacgacaaaaatagaggcgcaaggaaacgcctgtcagcaaaaacagagggatatcattaagattcaaagaatccagaatgtagcaaaacaacaatttgaaaagataaattgaatggggaagaagaaaacagaaaaagcaaaaccgtaggactcgtatactcgataagtcatcaaggaggaagccattccctccaccaaatatgtagaatatttctcgtcggcagccattcactcgtctttcagacttccgaccaaattgcgcagcacgtccatgataacagcttcgtcttttggctcgccgcctgggaatgagctctctggcgcatcgcccaacacgcgtgcgcgcgcactccggagaacttcccggatgtagtttttgtcctcgtagtcttccatgagaacagcttcaaagtcatcgattgccttattcgctcggtcaatgaatgaggatgactctggtggccctggtgtttgctgagcagggtgttgctgttgatggtgaggatgggccgggaggcctggaggtggatgatgctggtgttggtgttggtgttggtgttgatgctgatgctggtgctgcggctggtgctggtggtgaggtagcggatgttgctgctgaggaggatgcgacatgggctgtgactggggtggaaccggttgttgatgcgggtgcggatgctgatggtgttggaactgcaccccgccagatggagggtaggcccgaggctgcgggttattgtgagggggttgagaggatggcggcttttgttgtgaataaggggaatgatgctgaggtggtccatgaggaggccgtggggtttgcaactgttgctgctggccgccttgcggagcgggggcggatgcgtagggcgaagtgtaggttgaagggatggtcgctgcgaatgcagctgggaggttgttacggagctgactggggatggggaaggatgcagctggattgatagctggtgctggtgccggtaccggtgccgccgatactggtgctggtgcctgcgtaggtgcgggtgtcggtgcgggtgcgggtgcgggtgcggacacgggtataggagccggagtaggtgttggtgctggtggtggaataggagcagagacaggggcaggtgtaggcgccggtgggggtgcttgtgccggtaccggtgccggtgcagcagccgggggcgggggcggagcagtagcagtagcttgaaccggcgcagcaggaggagcggttggtttaggagcaggggccttcaatgcaggtgggtagggactagaccgtggtggaggtcctcctacattcacagatgccgggaaaggagcaggcggtatggaagggaattggaaatgctgtggcggatttggcaccggtggtgggccctgtggtgcataagagtaggacgcctgaggcatgtactgctgcggagtaggcgcaggaggatgggacacctgaggcggcggcgaagggcgtcgtttcttttccttttcaactgacgcgcctggaataagctgccatgaccagcccttgccatcgcgctctgcgtgcatgaacaaatgaccgttgccgttcagattgtgccgtacgctggatgtccaaccctcagtctcacacttgaagcggaagtacggatacttcagtttcagcgcacggtagatctgcttcaaggtcattggcgtgccggcttccgtcagagcatcaaatatgagaacggcgtaattgtatgggggctttgccagatcctcagtattgtaagcagactctggaggataattgggagatggtgaccgtgatggtttgcgctttttgaccggtgggggtttgacatattcttgcgcaggctctacagacaccttgccttccgttgagggaagaggagactccattggtgtaccatccggcttctttctcttggtgtacttccgcttctcggatggttttggtgactcgggaacgacagattctttggcaactgtcttcccagccttgggcactttaggtggaggtggtgtgatacctccgttggcctcacgcttggcagcatttttctgctcccgggcaagctcagctcgctcgcgcttggacataatcccatctttaggagggcgtcctggtccccgccggcgtgtcggctgtgaatcgttatccccattttcgatagaatccatcgcttgggacgatttggaatccctggtcttcaggacgatcttctttgaaggttctctgctctcgccgctatcgcttccaagtctgtcagactcatcgtcttcgtcatccacttcaatcgaagcccgagcatcttgctcttcctcctcttcttccttttctgccaatttttcttccatccggtccgctccagtttcgccaattgggacgtctggtagcaaaaatcggatgcgcacgcctccaatttggatgtaatcaccgctgtgtaacgggcgaacttgccccggcgatagccaatcagccccaatgaatgctccgttacgtcccattacttccatttcgaacaaattccgatcaaagttgtatgagatccggacatgcctccgagaaatccctcgatggcctgcggcactgccgtcaacggtcgttggggggtgaattgggatggtgggacaagaatcaggggatgggagcaaagccagcgcatcaacgggctttgcgtctccgtttccatcttgcaaagattgcattgcgagcgcattgtagtcggttgtcgattgtagttgagccgggtttgcatgtaatggtataacagcttcgtcaaaagaggatcttgaggatcgtcggctcatgttcatattgttcgggagatgcggaggtacatctggatcaaagcccatgatacctccccgatcactgacgacactgcccatcatagcagcgctttcctctcgcttcatacggttcggggtgtgtgatgtatttcctccacttgaactctttgcccgagtgcttcgtacggcctgccggtactggaactctcggtggtgcgcagcgcgggcagcgcgcacgtctcgtcctaggataaatgagtaggtattgacgtaaaaatgcccatcatcgaactccaatttggcaaatgcttgaatcttaggttccgatccagcgattgaggccgccatatcttgatatcccagggctgacaggtcggcattttgcgaaagaaaggcggctgtgagcatctcattttggtggagggcttcaaacgcatttttgggggccgcggaaaaatccaagggtggaaggagcgagggctgctctgggttcaatttcgggttcatggggtctgacaaggtctccatggcatcggttgagttgaattctgtatggttcatatcctggtgcgcggaatttccctgctcatcacctaaagctttcccattcagcaagtcctgaatctcacgggatatcgaggttgtgtctcggtgcaagctcgggtcgatgggcgtggggttctgggcagccatgtcgaatggctgggagattgagtcgtccatcttgatatctatgtgagtatcctggtgctcctcctgttttgcaggttgtaccatggtagtggagtttgcggctgattggttgccgaggagctgtgcgaggagcgcacttgcggcgctttgcgtatttacatcttgttgatgttgcgcagctgaaaagtcgtggctgtccgagcattcggtttttattgcgacgtccggggcgggcattccgttgggagttgacggggcagaattattctgcatggcgcggattgcggagtcgtctcgaggattggaagggggtgtggtgtctggtgagcagccatagtcgtatagggggctatcggggcctgggtcaggcggtcgatggcccacggctggcgcagtcatggtctgcgacgacatgacaggctgttgctgaggaagggagaggaatgaagttcctataagaagggaagttctcaacttggaaccgggcggtgagcgatggccgagttggtggctgcagatagccgtagtcaccgcagagccatgtttttttttttccttttttccttatttttcttcggctctcgaaatggcgatttgacttgcagaattcaccaacaagtatgaatctggaaaggtttacggttggagggatggagagaaaaagcgccgatgatcctcttccgggacaaattttcattcccgccccgcctaaatccatattctctccgaattgatccacctatatggattgcccgcaggtggttctcaccgattttgttgatcaaaagagcctagaactatataatgaatgtggcaatttatgaccctatgcaattgacctcattatactcctataatctcacatttcctcggtcttttctctagggtggagttgacccctctagtatggcttgcctccacgttgagatgaggggaaaccgtgctagtcgtaataggtactttaggcaaatgcaatttctatcttgtatcaagtccgtatatgcaagggtatacgatgtatagtactacacattctggggaagcggagtattacttgacacggggttaggtgtctgcgacaaacttggcaaaaaatgacagaaaactcagtgtttcttctgcttcgctcttttgctgaggcgtgcttggcgaatctaaacgaggagtagcataaggaccggcctggctgaggctgagagagttggcagaaacctcagccgctgaatggttgtcacgactctcattgtgtccctctgatatgacgccaaccaaattttgatgggttgaaagcgcatgtgagatcctgtgattcaatcatatcatatgctcacaggtagaacccgattataaaatcggcaccgacatccatgctctgtagggcttggctgttgatttctcccgtcagaggacacggcgaatcgatagtgcttgcgagattgtcagggtgcgagagtcgaataagtggaagtctaaatcgatggttaactaagggctctatataaaactagccgcaaagaataacttaactacaagaaacatcacatgaagattcatccaccactgccccgtaggtttgaagttacgtttggagtgacatgagacgacagagcatcgggctcgtcaaagcgagcgacgttcagaagaatatgtgttttgataatctcttgtcgatctatgttgtagttggtctaggacaatcatgagttagggccggagggtgggataaaaatagaatgtgacgtcacctttctgacaacaccctacctctccttcttccacttttgaatgctggaaaccgttgcagcatgacagtattttgcccctgaataattggtgggttcgctatagaaagagtgtctagaattaaggttagccgcagaccttgccaagaatagccgcagcctaaggggatcattattggctcagatccaagacccaaaatgatacgtaatcacttagcttctctagttaactattaactagttaactaactagcttttctattctataatcctctccgacatccaatctgatattatcggtagatagaggtctatagatacaaattttcctaattagcctatcccgactcctggacttttaaaactctttgtaattggagttttatactagattatataaaagactcccgtcttaacagttagcttacaatcacttcactagctttacgtcgaagcaggagtgagtgttacctgccagatctttgtagcaaaagagtgcattggaacgagattattaagtacaagaagagacaggaaagagaggagaggggaaactcggggtatacaaaatcctacccatctgggaaggaacgacctgagatagtaatctaacccccgggcaaaggtgttttagtccctaaatgctggtttttcatcgttaacctggtcattaagtatccggtcgtcctcgtagcttcaatctattcctgatccggtttttctgaaacccaagaatgatcctctaggtttacaattgggagtcatgttacgatccaacgtttgctttgctttgcttgtttgcttgttttctagatagttgagcgagatgattcgaaccttgcattgtttacaaagcggtcaggatacagctataagaactagctgtctcccactttgcaacttgcttccttcctctctctccctatcttagttattctgaattcaatgcactcttctatcttgcaagacctggcacgtcacaagttccatggttaggaaattgatgttaagtgtgggaaaatgtatcaagtgacctcgctttgacatagttaatgagaataattctctcccactatggaggttctgccggaccttgtcctccggatcccgcccgtcttggctcacatatgacacatagttaagagcctcaccctctagttactttaggcttcgatccaccttccaatcgactctcccaccctcccacccacagcaccccagcgcagctcgaatgacatcctcgttgcccggattccgcaagggcttcgaccctagaactattatcacccttgataaacccctctcttcccggtgggaaattcttgagaagctgaatgagtatgacgatcaggtatgacccctctcatcccattacagggtcctcgggaatctgaacgagcataattggtaggtcactgtggaggaaaataaggcatatggcctccgttctttcgccgaagctaaatttttatgttgtgatcctcaacgccgtgcaacgaaaacctttatgcgagtctacattcaagttccccatcgaacaactgagatggatgatgcggacaccagaggccagcaagccatgtcatagatcccgcatgaattagcttccctgctcgatctaactgaaaaggactcaaatatcacaccaaagctcctcggatacaagaccggtactcaggatcgctcagggctagttccggatgggttcatcatatggcttgcttgggaaattgttcctgggctacgccttggcgatagtgatggcgatggtccattctggggtcttgaaagctctgaaagaaagcaaatccgtgaatcccttcttaaggctcttgcgtaagttcgatattccttctctgtatatcactgaatctaattattattaatgttttagcaagctgaaggagtatgggtggtgcccgagcgtggatagggcaaaaggtctagtttggcaccgagagactcaaacactgtatgcgaaccacgttatcttagcttacttatttactgattgaatatagctacttcatcggtggcttctgcgagaccatgaaggataagcccatgcgtgtcgcctgctcaacggttcgcgacttttgaacttgctttaccggatgatccagtcagctgggaaatggaagactgggataaggatacttcacgcaggaaatggtagctaacgaggaagtaaatgttccgctcagcctcacattgatctttgcttctgagcccagggaagagagggtcggtgcggcagtcgcgcgacggagggtgagaatcacccgctctcacctggcttctcactcacccagtctcacccggacggcagcaacccgaccttctgccgcagataaaccacacaccggtgagtaagtagttaggtgggagtgcctcgctagctatgttgtacagaccatgactaggacggactttgattcgagcctctttctccaatgtccgagaagctgatcaatgaaatcctcgaatgcaaccacgagttgtatacacagcccatatgctgtaactgtcggccataatatctgagtcactgctagcagccccaacagcagctttgtttgtaggcacacccgcttttgatcatggaaggagtgtatttgatttcagtgaggtcaaaatcagaatgagatagttcccattggcgcaaccagggttgacaaagctaatattcacgtccgggttctagcttctggatcctgggggacaagaacaggctggcagctcatcacaagtgggtgggtcctgacccccgggggggggagagaggatccccgacgatccccagaaactaggctggccaccacgtgacagtgggtttgattgtaataatcaaagatcatattttcgcgataaaaaaaagccaatcagaccctttacatctacctctttctataccttcacctcacaaagaacaaagacccaaatggccccaaaacccaaatccaaaaagcccgacccaaacccgcaaccaaaaaccacaaccccaaactggccacccctccgcccactcctcccggccaccgatctaaccctgacccccgtcctcccggaccaaatctacctaatccgcaatttcctcccaggcaccctctgcaaaacctacacctcattcctcgcctcgctaccactaaccacaacaccgggcgcgcccaagaaagacgaggcattgcgcgtcaacgaccggttccagatcgacgatgcgcggttcgcggagatgttgtggagcacgacggcgctgaaggagcttgtcacgacgcgatttgacgaagacgagtccgacgaagatgacggtagtcactcgcctgctctcggtcttgctgaacgcgcgcgacaactctggggcggggagccgttggggttgaatcctaatattcgcatttatcgatactctgcaggacagtttttcggacaacattgtaagctctttcttcgttcgtttttcgtgctgcgaattccattatggaaccatacacatacatacatccaagcaagcgaaaattacacaacactcgttaattaacccaatcgcagacgacgacgccaacaatataaccctccccccaccgaactcacgctcaaaagcaacacccgcgcgcacgacctggaccctcctgatctacctgacgtcctgtacaggcggtgaaacgatcttctacccggagccgacgcgcgcgaaccgtcatccggagccgatagctgttgcgccggaggttgggatggcgctgttgcatcgacatggtgatcattgtatgattcatgagggggctgaggttactggtggggagaagtgggttttgaggagtgatttggttgttcctaggtgattgcattttggagtggcgaggttgtagaggtgtagtatttgttaggtgtggtagaatcgtagtgggcaggtcctacgcgatctcgaatccgtggtgtttggtatatagcattgcatgggaattttagttagggaattaaacagttctagtcattctgttggatcatacttagtattgggtgcaatcgactggataacacggtagcaaaaggacaatatgaacaaggacgacagtaggtccctgtcacagcacgcatgaaagagacagttgtagatacaagttaaatagtcgtaaagagtggaaagtttgctggggaaaggagatgggaggaaacaatgagaatgaaacaaagagtgagatcatcagttattgaatagcagggtgacagatgagagctggacctcgccaatggatctaattcccggaaagcctccagattcaatttcattttatcttatcaaattggtttggaaacaggagacttctccccgtccagttcatactcggctcctctcatcatcccctccacagggccgagaagccgcttgaatccgtcccggcccaaccgtgccaccttcacatccgttttagtggtgatgctcgcctggcggggcttgtcgtccagcaaggcaagctcaccaaagtaatcacctcggtgatagctcttgacgggcccagagacaccgttcttggtagcctcggcttcgcccgactccagaagatagaatgcatctccgggatcgccttcgtggatgatgatggaattagccggatacttgatagtatccagagcatcggcgatcttcgagcgctcgtatggcttcagagaagaaagcagcgggacttcctccagaaaagcctcgtacatacgacggcgttggaatgcagagtccattaagatgcggcggaatgtgacgcgatctagagcccacaaagtgctctgcggctcagtggagatcactgtcgcagcacgcggggcattgtacatcagagccaactcgccgaaagatcctccgggtccagtgctggcgaccttgttgcccaagccatcaggaccaggctgcacggcaccagaaggattgatatagacgtcgaaatttcccttctccacgatgtagaagtaatccccggcgtcgccttgggagatgaccttgatatccttcgccggaatgggcttctccaccagagcattgagcacggtcgagaatgaatcatcgtcgaggtgggagaaaaggaagttgctactgacggcgctcttgagccgggaggcctgctcttcggtctttgggtggtgaggaggcgaccaactatctgaacccgcttcagtagggtttaaagattccgctgagaccgatgtccgacgaccaagcgcgtagttggtagggaatccttgctgtgcggatcgttccgggagaggggcaagctccccctcctcctcgtcatcctcccccgcattatcctggaagggactccggctgaacaacgatctacccacttgtaatccttgtgatcctccttcagcgaatgcactacctccaaacaaagcggcgctcggcagcgcagcacccgaattaggctgtcggaaggtcaggttggttggtgacgtcacctcgaagccgtcgtcctcggaatttttttggttgccagcagaattgtcgtcaactctagtgttgacggccggggccaaatccggagcagagtttagagccatgagggcgttggattgagggccggagaggccgcaactccggggttgaagctgagagagagggacgggcgaaacagagatgagatctgtggaaattagaaaggaatgaattaaataggggagaatgaatgggatgaaaatgtaggtaatgcagattgtagaggagaggaggagaggtagaaaaggtagagagtaggaagcaacggaggggcagacagtgggggattattggttggagtctaattgtaggaatactgcatgacctcgtccctctccttttttttctctccttttcttttctctctcctttccgttctgctttcttttttctttctttctgtctcgggaaaataaaatggaatattgcagggaaaaagaaggagaaagaaaaagcaaaagcaagtcaagccaacaacaagcgaaactgaaattaccttctaaaagcaagctcagctttacttataacaagcgagtcagtttggaagacaaagggggaagacgtggaaagatgaggggtacacactaaagttggtctgagcttcgtcgatcattggatgtgcttcacctttcacgcactgtgctatgtactccatgttgtacatatttatggagtaatggtgatcgacatccattcctatactaagatgtgggatactaggtagtataagatttaatttaagcccccgtctgagcgtcttctacacgtcttctagaatggcatgctcgccactaaagtggcaatttcgggaaccttggaagtatcaccacgtcacacatgtcatggactcgtgttcaaatgtcaccttatagaacgggataaaaatacctgaacggcaaaatcaaggaaagtgtcaagagtacagacgtttcatgctctggtggggaacgagaatggatatcatataatccacggtcttcgctcaataattgtagaagcatccagcatacctctatctagctatagcttcaaatacggaaccttgacagtatggagtacttcgttctccgttgataacctaaagctctctccatggcgtcatataaacgagaaagtctagatcgggcgcatagacccagccacagccacggttcacccccagcccccttatattggcgattggccatgtcgatgtgcatgcgaagtctgaattatagagcgctaagtactgtccagggccaggtactggtctgtgtcaccccccaccgattcgaataatttacttgggcctttttccctatcttccccaaactatcttttcatttttctcttcacgttctgtgtcagaatcaatatgggtacctttacatttcactggtgagtcgcgcttctagcatgtcccattctcgagatttccatttcgaaatctctcctcctcgtacaatgctgagacggttacttgcaggccttacaatgcgagcgaggtgttcgttacaggcactttcgacgattggggtaagacggtgaaactggaccgagtcggcgacagctttgtcaaggaagtgactacactgcctgtacaaaaagtccaatacaaggtatggcctttcttttttttttcttctctcgcacactttcgcctttgccttgccctcgtagattggatggcggtgagcatttacaatgacgtcacctgggccgctttttccccccatttataaggtcgccagttcccggaatccccaaagtcccaaacattttaagattgcctgattccccgctgactcaaaaaaattcaaaagtttgtcgtcgacgggatttggactacagaccccaaagcacgtgaagaacaagacggacataacaacgtcaacaacgtgctgctgcctgaagaaattaaggcttccgactccgcccccactatgtctggcgtgaccccttactctacaaccgcggcactcgctgccaacgttcccaaggagcccaatggggatctccctggtagcttcccagaaactccgggacaggaatccgaacagaccttttccgtggatcccattccagcttcgggaggttatggtaaccccgttaccctgaagccgggcgaggaagtcccccgccagagcacattcaacaacaataccgttggctcaactgtcactttggacaaagaatcatatgacaagggtcaaactctacctgttgacggctaccaagcaaacaacaccagccctgagactttcgcatttgccccttttactctccccccaatcacgaacaatatgattcctgaatccagtcttccgatcggtggaccctctcagtcgtacaccggaggtccagcgcagcaggcagcgctagccgatccggaatacttcatccagtccagtggccccacctcgaccacagcggaactcgctgctggcgtgccgctggagtcaaagggcaaggccaacgccaacaagcccgttgatgaggtcccccgggtggtgaaagactcaattgccgaggctcacaaggaccctgaggcgactacgaaccaggaggcacttgctgagaagtatgctaccgagaaggagctacaagaagtaccccgttgaaaactccgcagggaggttcgttcaacccgttgacgaggttcctcgggttgtgaaggactcgatggccgaaggttataaggaccccgaggcggctgcaaacctgaaagcagtcgacgagaaatatgccaccgagaaggaactgcaagagaagttccctgtcgaggactctgcgggtagacagaccaacggtcactaccctatccctcgggcagtgaaggactcgatatccgaggctcacacaaacccggaggcgactacgaaccaggaggcacttgctgacaagtatgctaccgagaaggagctacagcagaagttccctattgaagagtctgcgggaaggttcgttcagcctgttgaggaggtccctcaggtcgtgaaggactcgatggccgaaggttataaggaccccgaggcggctgcaaacctgaaagcagtcgacgaaaagtctgctaccgagaaggaactgcaagagaagttccccgttgaagattccgcgggcagacagatcgacggtcactaccctgtccctcgggcagtgaaggactcgatagccgaggctcataaggacccggaggcgactacgaaccaggaggcacttggtgagaagtatgcgaccgaaaaggagctacagcagaagtaccctgttgaagagtctgcgggtagatataataagcccgttgacgaggtccctcaggtggtgaaggactcgatggccgaggctttcagggacccagaagcggctgccaaccaagaagcagttgacgagaagtatgctaccgagaaggaactgcacaagaagatccgtgttgaggagtctgcgggtgcaccggcgcctactgccactgcggccacccaggccattgcgccccatgtcactgccagtggtgtggactcgtcagatgtgtcgccactttccacacctacggcgaaccgcagctttactgctgctaccccatcttcagcgctgaagaccaccgagtccagtgggccgactgtcacaactggccccgagactacttctactgccgaaacctcgactgccggaaccacggctgccgcgactgcggatcccgcaggtcccactgtgacgacgggagttgcatctgctcaggcacctaccagctcgaccgcagagccggcagatcccgctgcgaccactggagctggatctacccagtctcctgctacttcttccaagcccgcttcgccgtctcgcagaaaatcccacagcacggaaggtgctgcttctactattggtgacaagaagaagaagcaccgcctgagtggctttttcgacaagatcaaggagaagcttaaataaatgactcggaaatgtccaatttccgaccttgggatccgttctatgattctatcatcttgggcggtatagtcttggctgtgaaagccgaccgatatcgcatgctttttctctgatgccttacgttctttgcttctggatacctctcctgccctgttttactgcattgtatttctgcaagccgctttttgtttatgactcggctagtaattatcgtctaatcgaagtaccttgcttgatgtgttgattgtttatatcgtactttatgtcttgtacttgtatctaagccgaaatcggaccaaagtcttgcgtaatatgttgtacagaactcggagtataagcatgttgattcgacatggatcatgaaacatgaggttaaagacccaatcagaatagaacctgagaactaagaaagtcgaatgtacaattctccacgtataacccttgggattgcccttgtcatgagtggggagaaggtcattccctaattccgctcttctccacctttccccgactttggggacttccaatcttctttcccttctcctcccttcttctctgcattgtacaagcgaccttggtcttgggggtatctacaccaccgcgagcacaatatggctacccccacattgtccgccatgatcgacccgacaaagcaggccgaatacccaattgtgctaggggaaaggcttgctcgaaacccaaacacgagccggctgatcaacgttaactacaaccacaaatccaagtccgccacctcacagcaacgttcggtcatcacccactcccgatcggccgacctctatgacctcgccgtgactgataaggccccgaacgccgatcaaacgttgacctattcatacaaaggcagcgaggacccgtcgggcgagcgaagcctggtactcatctttgacccggagcggaaagtctttgttctggagccggtctcgacaaccttgaactttaatctacggtcggcaccaggaaagacggaaaagcaggtccgcgagcaatacgaacaactacagataaaggaagaagatgaaccagcgaacccggtagaagaccggcacggaggaagcgccagcgaggatgaggggccggccgacgacagcaatccctatgacttccgacatttcctcccgaagaatcgccgcgaggaggacaagccgccctcgggctacagcaccccggaacttgtcaccagccgggccagcacaccgttaatgccggctgccagatccgcgccgagacccgcacctcgacccacaacgcaagcaaaccccctacgacagaagagaccgccagcaaaagcacccgccaaaacatacaagtcaagcgagccggtcatttatcccgacccgtctgagcacggggactcgcgctcgtcgccgtccgatgcaggcaccgggtcacaacaagctgggcagtctcctggctcgaatatcattgtcgatggagatctcattattgatatgggatctccacctccgcgtccgctcgtggaccggacttacttctcgtcgaataatacaccggcagatgacgatggcgacgaagacgttggggagtttagtctgccctccccggtcggcaatacagctccactttcctcagggcacacagacacggctgcccaagaggacgaaatggaagatgatgatgctttggcggcagagatggaagccgcctttgagcaaagtgctcgtgaagaggaggctcggaacaaccagtacagtcagccaacgaccaggcaatatatccccagtgatgatgagagcgaggtcagcgaggaggagtaaatgtttggctttcttgtttattgcatctaccagcgtggcgccaggacggactttgattccaacgtactagataccaattgtaattgtagtatatttgacctttccactagttcagaatcgctgttctatttagtgcattgttctacgcatcttcgcatcttccaactcatgacataccaaagttcaatggcttcatccccctatccaggagggcaacacaaagatcgttgtttttccattcactagtaatttgggggtgtgcaaatagtaattctcctataaagtgtgcattgtcatctcttacatcggataaatagttccttcggataaaccattgttccgaccaaaagcttcccttgtcgactgcgtcaatacggagatctttgccgctttttaagttacctagtagtgctcaatatctcggcagcactctgttgtttatattgcttatatattggttatccctgaattcccttctccaattctctgaacatctcccgcggtgcactatcatatccgcgatgcgatagaaagctccgccgagctagctttggcttacgactgtgacgtttgtaacgataacgactattgtgaaccacccgcgcaagctgttccttatcgcgcgctggatgcgctttgcctcggtcgccattgtgtgaacaacccctcgatcttattctctttcccctcttcacacagcggccagccatggcttcctcagcaccgaagcgacgaatccccggcctgccgaacccggtgttggaagcggagcagcaaaaatggctattcaccgaggaagaattcgaccgtacaccatcgcgcattgataagatcgagcgtgggaaagaggactacatccgccaccgtgcagtcgacttcatttggcaagtgagcgtgatgttgaagatgcccccgcagacctcaatgaccgccacggtgtacatgcatcgcttcctcatgcgctattcgttgatgggccaatatccggagatggggtcggacctgatgcacccgaaggtgatcgctgcggtggccctgttcgtcgcgttcaaggtcgacgaggccatgcgccgcatgaaagactttgtcatcgcatgctgccgggtcgccatgaagcagccgaacctgattgtcgacgagcagtccaaggattactggaaatggcgagacctgatcctgcagaacgagagcgtcatgcttgaatacctctgctttgacctacaggtcgagtccccttaccgcattctctgggactactccatcttcctaggcgtcagcgacaacaggactttgcgccactccacctactcctttctcaacgactctacctacaccgtcctctgtctccaatttccaccccgcgtcatcgccgccgcagccctgtacgccgctgcccgccactgcaaagtcgccttccccgacgacgccgaaggccggccctggtgggagcagatcgacgtccgcctcgacgacctcatccgcgcctgcaccttcatcgtgaagatctacgagcgagtccagcaaagcctcagcaagggcttcccggatttcgcgcttccagactcaaccccccaacctaacgacccaacccgcatcttcgacaccgatcccacaaaatccgcctccgagcagcaatccatctccacccctcctaccctcaccgtcacctcagacacggcttcaaacggccgcaagcgctcgcgcgaacccgaacctcaccccaccacacagtcacaaccacacccaccctccccaaaaaacaaacccccttcaaccctcacccttaacgggaacgggaacggcgaccgcgatcgatcgcccaagcgccagcggaccatcactccctccaatgaagccgtcctccccacccaccaaaagcaaaaccctcccgccccctccaactcgcgcgtccccgcggcagcattatctcaaacaaaagccacgcctcaattcaaatccatgtcagtcgccgaagggaaaccggaaccaggaccggggtcctcctcaaaaccccctccgaaagaagagtccagcattgacgtcgaagaaggcgaactccatgaaaaacaacatgtcgttccagtcgcgcatcccactccggcggatgtggattctgattctcggagtaaactagactcccggaaagaggagaaagaggagggcgaggctgatgatgatgatcgtgctgggagtgaagaaggcgagatctaggagtttgggcttctcaggtcctgtggatatgatagtgggaggatatcgacatccacattgtttttgcttgtttaccaactttgtacttatgtcctgtgtcctgatttattaggtgtagacaaaatatcttatgaatagttctagttaatgtcagaagaagacgtacgattcaatcctagtttccaagtccaagtccatagccagacccaggtctatatattcgtagctatgctaaaaaaaaaaggcactagctacagtcaactatctacctaactaaagcgaatgattacagacaaacatcttcagtgtcgcgcggggaaaaagaaaaaaaaaagaaagaaaggcccagccgtgatttgaacacgggaatctccgcattacaagtgcgacgcgttaaccactgcgctactaggcctgcggtgactgattattttgtataccatttcttctagccattttgtttcttttctcccagacagaaaaaaagagaaggcccagccgtgaatcgaacacgggaatctccgcattacaagtgcgacgcgttaaccactgcgctactaggccggtcaaggttactgaattttattttagagacgttataaactaaccgcttttaaccccgttacgttcactattgtaaatctctctcttatgtgaggtgtacaattatcagctagactgggtctacgtctgtcatttcgggggaacttggtgaatgggatgcagtgtttgacggtaactgaaatcaaaaatatcaagcagctttggactacaacaatctcaaaccaaatttacctgttgattactaacaaacattccatcttttttagttactcaatgatcaaaagcggcaagaggtgagcaccaaagcagaaaggggaggtattaactatccggtacatatgacagagaacgtttcatacacagtttccgttaattgattttaaattcaatgtggtagatatattaatgaagccgcttggtaaatatcggactccgcatccttcgtacccaacaggcaaatttggacgcaacaaaacgaacacaaaaataaataaacagaaccaagacaaacaaataacaaaaagccaacttttgaatgtagatcggttcgatctcaaacgggaattgcaaggtgctcgtgatgaaaagagacaaggtcatcactagcctcagcctggccggacccgaacgactgcagattccatttctcaacaccctccacgcctttcagatcattcgcaaatgtactaaagaggtcacgattaagccgttcgtactcggagtattccttgggccaatttccaaggcgttcaaccgcaagtttgagcatatgcaaatgctgtcggacatgcttcccttcttccatgttttcgtctggactggaggcggacgaaggggatgagatgcccgagatgacatccatgtccacatcgctggcaggtgccgaggacgggtcaatgaacacacgcaaggcattctcgtgcagcgcggctgctttgcgatagtactggtaggccagcttacgccgactcttctgggtttgatagccttgagccacgcttgtatacatctgtgatagtagaatagtcatctcaaccgtacttggatgtcggggtccatggacacgagcacagttgtagacaagatcctccgcaagccggacagctccactataatcgctgatgagatagcgggtaatgaccaacatacgcccgagcgcaagcgtatatgaatgccgtggttgtgacaaagcataggcgtcacggctattccagagggaggtgagaacccaggccatggtgtgataatcctgttgctcatctagaaccttgatcaagcgattgatgtgttccagatccaggtgtgcgagctcaaagttgtgctccttgaaatattcgagagtatcacgaagaatcgtcgctgacacgcttagcatgtacttatcggccgagcctgctgggtgtatgtcattgtcttggccggccaggagaaggcccagcttgaacactagcttgagtgtcgcatcggacgagtagccatggtgagcaccgatgtatttcgtcgctgccaatgcgatgtggcaggcagattggtaatctttggagcgaagcagctggtctacgcgattgtaactggcgatggccactgaacgcataaagtcacgcgaggaatgagtgctgaaatattccagaactgtctcaataaaagccttagcctggttagggccgatttccaggttggaaccctctgtcgccaagaagaagctggtataccgatctgccacctgagtggcagtggatggacggccgcgattaagtaagaagccatgcaggcgggccgcggtttccgccgtgtcttgaagcttgccagtcttggagctgagggtttcccggaactgttcaaagtatatatactccgtggtgagggcggcatatatttcgttcaaggtagtagagttgtccccgcattcccggatgctatattcgaactgagcaaggaaagcaagggttgaccgcccttttgagctccggtcaaagccgagagcactctcatccttggtgtccttggtaataacatgacgatatatctcgtttgagagttgctcggccttttgaatttgaccagctgcgatatagccagatgcaatactcttggccgccgcaatcaacttgatagagagcgtctcggtcgatagcacttgcattgctgcttcctgtagcagcgaaacagctgcctgtgccttcccttgtttagtgtagagtgagactacctcccccatctgagatagggcttcctcgtgggcccatccatagctggatcgaatcgacgcgagtcgttgggtatgaatagacaacgtcttctgtagctcctttgttgacatgttctcaacctttaaagtagtgaaggctgcactctgctgctcgtggattgcatccaaggtggcacggatgtcttgatagtcgatttcaacttcactggatttaatttgcaaaagctcttcgtagagttggaccgcttccgcttcgaactgctcggactcttggcagatatttgccaatgtgttggttgcctgtatggtgatcgacgcgctcgcaccgaagagagtaatgcacgatttacgatattgcactgtcacatcatgaatggtggtagtgtcactgtgtgtcatttgcagacaatgaacataacgttgatagatggtctggacaaatcccggatcccgcaatttttggctgatctgggggctctgcaaggtagtgaacaacatccggcagggtttcagtgcgtccgcgtatcgattttgcttcaagagctccgtcgccacgataacaagtggctcgaaggcatccggaggacaggtttcccagcccttgcttaggacttgaactatctggcgataataatccactgcgatgggttgcggggccgtcagctcggccagggtccagagctgtcgtatcacagtgggatgctccccgccgaaccgcttagtataatcatccagcatatcctggtggatgttcacgacttttccggtctgggaagtacgctcgtatagacgaagaagattcaatgtggctcgctccacagtttgctcgccgcacactggccgatcgcgtcggactgcactataaagccgggtccggatatcctcttccttgaccgggtgacggcggtagcggtagcacccagcgaggcgctctgcaaaatcaacgcagtgctcaacattagttgatggcaggacgaccttttcgatcgaagccgcaaacaacgacggccacatatctcgaaggactcgtttcaacacccttgtagcatcatgccaccggtgttgagacaagtacatttcgattagcgctgtgctcgctgttgcgaaattttgctcgtcactggatgaactagtataaaccatttctttcagggttgactcggtcagcagagattttgcagatgacgagtgcatcagttgccgggaagtggactggatatttctttccacttctttgcgggtggcactctggctgctagtactttgtgcgcagtatttgaacacttccaaggccaacacagacagtcccacttccttcatgaactgagcaagctcaagcaactcggacaccaaggcttcggcactggaggtggttttctcatactcctcccaaaccccggcaaggatcgaggccgcttcgttatctctcttccgacttttgaggaatttggaatactcgaggacagtccgcagaactgacaccttgtgctcagtggagtgactgagccggtatgcctggctggtttgctgccatagctcaaggtatgtccgttcggcgtccgagaagtgaccctctgccctctgtcgctccgctttcgtcaggatggtcttcaaatcaaatgaatttgtaatcaactcgtccacctctattccagtcaaatccaggggggtgcttgtctctggcatcgtgtgtttggggccgtggaggtggactagtaatgactcgtccatctgcacagatccgctccgctggtgcgtactgttgacgaaggacctctccaaattttcattaatctcctgtactttgcggtactccttgaccagactataatgctcagacagctgcgtcaacgtggatttgaccacactacttgtcgctccgtggtggaccttctggcattcaaccagcatctggagaatctggatgcgccgtgtcatgacttccgtgacagagtcagtcattttatccacggtggcatccaggaagaactgagccatctgcatagtgatgagattccgtacagacaagaccttctggcagattgttgccgcctcatagaagatccgactactctcggcaggcacgctgttgctaatctgtcggaaaaatagcgcctggcagattacggcctgtacagtggctggatggttgttgctcaatatttggcggtacagggatgtctgaacctcatgaatggaccgaagcaacgaagtcgccttgcttgcccacaaagtcatctccaggagtggcacagagggggtcgcagggagaacagatcggaaactcttgcttgcgatattgatttcttggttgttcgtgcatttgaatgcaatcttcgcatagcctgtccagtaacgaagcgcaaaatccaataagggatgtttcctcaacaagtcttccgtcacctgcccattcagcggctccaaggatggcccatggctatcagtcacagtttgctttgcgtacagtaggagtctctgtgcaaaatccacatgcctgtccttgatcgcgggtagaaatttgcccttcgagaatacatcgaggatagcggtccgcaccagtgcgtgtctaagatagacaaggtttttgtggaagaaaaccaaggaagcgaccggcttcaatagctgagggaagtcaatttcgcgatgctcggcgagggccgcctcgtcaggcttggtggagagaagagcagccagttcctgctgggcgaggggacggttcgcagtgactagccagaccaaaatcttcttcgtatcctcgcttagcttggactgtaaggtgtgggatatcagatccgagatcttatgtcctgcctggacgatattttccaccgacttggaaagcgcggcctcgttcggcgggttctcatcgcgcacacgcttggccgccagcttcgcccaaaggaaagagccatccgatgcttccacaatccgagcaacggtcacctccttgtcttcgttggacattttgctatacacatggctctgttgaagggttttgcgggtcaccgcgctaatgtcatcgaagattaagcctagggtgactcgcactaccatttgggaggtgaccgagtccactgggtgggagccgagtgtgatcaactttaaactgggggacttggatgccgcttcatgaagccggtgtgacagggccttctccccacagctggcctcgtccacgccgtcgacgactaggactagctctctggaacctgctccactagtcttgagagcacggcccagggcatcccataggagattttcatacaactcttcgtccacagtcaaccggctctggttgtaagcctccgccaagatttgatatagctgcatgttgccaatgcgcttgctcaacatctgcgacatgatcgtcttggcgacggctcccggggtggtattggcagggattcgaccatctatctcggctcgttagagagtaaaagttttgggttgaggacaatgaaactaaccgatagatgccaatatggacatataccttgttcctcctacgggatactgcagataatcattgatcacagttgacaaaaccgtcttgccggaacccgacttagaggtgatagaaaggacctgcttttcgcctttcaagaatcgcatcaggtatggcttcacccacgtgcaagtggcctcctcgcgctcctggcccgagggggccgtggcttcggtgatatgggcaaccactgggtcttcgggctgcaaccagtctttcagggtattgattccgacggctagatttatataataagtatagatcacatggctttgggggagcgagtctacctttatctccctcgaggccctctcggatcaattgatgacgccacataaggtctgaaatgtgctcacaacgaccacgaaaactgtcaatcggacctgggaaggtactatagatatcaatcgatacccattccgaggcaaggagtgaccgatgaaagtgcgtggccacacagacgacgagagtaaccagatcagctaacgcaagaatgagctggtctttgatatctgaagagaccacaaagagctctgcacgatcgagcaggttgcctagaccagaagagcagcgatagaaaaatccaaataggtccataagggccggagcattttcctcgcccaactgtacgcttgtggtcagtcaatccgatttagtgggcacgaggatgtggcttctgctcacctcaagcaagctcgcacagtatccataggataactgggcggcgaggtggctgtcgccggcaaattgttcaatcgctaaatcaaacgaatgcacacgctcaatgaacagggccgcccacacaagggcattgtcgtagccactcccctcgggcggtaactttctcatcctctcgcaccgaatccactccaacaggctagcatagtcagtatcggacacccgagaggccgataggtcatcgctgccccgacgcgcaagcgagttgactacatctgcgagtgtggtgttcttagtggtttgctggtattgatgactgaaactcttctccctggctacggtcgcgtgctgctctgccatgttcgaagtgggtcgcagaccgagtagcgaagtggaggacaaagatatgccatggggcactgaagccatgtctgtgtgcatcaaatatgatagaaattatgataataattaggctcggttggatcctaaggaagacattatatgtcccggtttagggaggaagctcctcttccttgtactcttgttctctccccctctctcccatgatgctgtactgctgtaccatgttgtgattgtgctgcaaagtccaagacgtcaatataagctccaaccgatcataatcgcagagccaaaacaagagtacagcatgtctatggagatagtatctattttcgccactaataatggcatcatttagttcccgccgtggtctctgtatggatcagatcactcggtgcctttcgtgtaatgaaatcataaacaggcaagaaaacaagcagaacaggtatgtagccgaaccctcaaggggttaaggtttccgggccgatcctagcaaaaccaaatgtgtcattgcattcgctgagaacggttcttccacggttattgctagacggttgcaattgataacataagaacaaccatggatccatctacgggtgtgatgtaggatagatgcggggaagctgcgcacttttcagaaccagatccatcggcatctccatgggccttgcgccgccaaatctaaatcattaactaccagggattgtatgtcgtaggtttaagatggcacacaattaaataaaaatgaggtgaagatgacgctgtagtgggccacaacccaacccagatagcccaatttgaatgaaatgactttagtcgaaacatggaattgccgcactatatctcccttgtggccttccaaaccccggacactaagagtcccacggggaattaaggttgcattgatatgcggggacggcattcatctgtccccacatcccgctctgccgctatgatctcattctcattatctacatctcgggacagatgctgaataaccatgggaccgtcccaaaaatagttgtcaaccagacgatcattaggattccgccgcggttcgcttgattgtgacttctagtacttccgcgtcttgaggcaagtcggccccatcgtcattgttgtcgaaatataatctccacagatcctggctattctccacaccaaccacctcagatatcttctcgtcgtccggaacccgcacggccagccaaccttcccagccctctagtgtgatccgctcttcatcttgtgtccaatcgaaagggccacatatgtttccttcgctatcctgtttccctccccatcgtagctcatgggtctgcaaatcaacataaacccaacgtagagttggaggcgtttcgcctgtgatggtcacaaaccccgatgtgttatcaggggggaaatccggatgttggtagaaggaaccatttagtgggacaagctgtgaatcggtagatttggtgatgtacatctagattgtggtcagtgataggcagactcgatttcggccagcgcatatgcaagggataataaaatataaatcaatcggtcgtatgggaactgacgtgcctttttatccgcgcccaagtatactctcgcattatgaattgccaggctttggggcagtaatccatttgagggcatgcattggactgaaaggtaacagcgctcttgacgcgcactttcccgcctgcgctcttcatggtcccgcgtacccttggaagcctcgttgactccaatgatggttgggaccatcgcggtcatcaggaaaatgccaaataccatcttagttcaaggtattatgcagtggcttcgtttagtatgaacattggttgtactcgtaagttgtttctggcctttcgacgaagtttccagcaatgtactctagctagctatgccttgcacatactgtggcaagatggcttctaaagccgtcgatctatttgacgtaaggaagaattgatcaaagtttatcttttttgattcatagcggcaacaattcccgctaccctacaccaggacctagtcgtcaacgagaggttaaggttctcattctgcaaacggctgattgtgtcctaggagttgaagaaaccatggatatgtgaccatatcatgctttcaatatctctagggttcagaaaattagttcatagactaatactgatgagtgtcattgactctctgccttcttaccatgaagggtaccatgaggagatatatatcgcaggggctttctcctcaaaaaattactacgcaagtaataatcaagaacaattattactacagcctaagcagtaagttttatgctcaaaatattcaaccttttaacgcatggttcaacaacgaatttcgaatttctgatgtttttctccagttcttaccctgtggaagcaaattacgagaaaatatgggagaccctgtcccagcgttaaggtatatcaaatcccagtttatactttataccctcatactactattttctatgcaacaacaccctcgtttaccggtcccggaggctaaccaggcattcaaacggtgcagtgccgcccctgcccttggtaaaggaaagcgtaggggccgcgagggatcagaaacctcatcttcgaccaatgacccaattgaggatctggtggaacctgacactctggctaatggaattcccctgattggacctggcgccgcccgtgaacttgacagaagaagaaaagatgacaacgaagtgaagaaggacaatgataagggtagcctgaacatcaaaatccacctggacttgcatgccaaggtgaagttggatttggaggctgacatatatggagatattgtgattgggctactgtgatggagagcgttgcgggttgttgttacttatcaatgcgttagttaattacatggtggatataccgccactaggcaatttcaactgtgaatctcgatcacaggacttcttccataatctttgatcgtactttttaagaaggaaagccacaacgaaggtgggcgtctatgtttatcctcttgctagtttgactgtgaagtgcaatatgtatgatcctataaatgcctgattctacaggcttgtttgctagtttgcttgctagctccagcaacctaaagaccgccgaagagaactcaaatataggaagagctctgcaagctcggctacaacggcagtgcatcagtgaggcatgatttaaatcctctaagtgcacatttcgggctatatatcgaaacaattggtcgcttggttggtagaagttggcgaactgtgagttggagtaagttattacagatagggcattcggatatgagaagagaaatgtatgtagtgaagaggggaccctgccacaggggacaggggcaccgacagccttgtctgcaaaacaggtgtgagagcagagacgacgagcgcaacgatcggtaacttaccgcgtataattgcggagcgaagcaaagcaattaaatcataacctcgtgtgcattccacgtgaccaggtcttttcattggttttaatgcggtgaagaagtagccggctaactttggcagaataacccaaccggcagaataaatagctagggagtggtcaaataccaccaagacctttttaggatatgccatggagcatttttagtctagcggtattgacaaagcaacgctgaaaagggggcttcccttctcgaactcaagttattgaactagacctgcaacacgatatacatactttatcctgcaaaatggtaacatctaacaaatcctgtgactggtgctcgacagataggacaggtctctggtgatttgagatttcctgcgcataaatcgcagaccatatgtccacatagaattgtcacccagcggtctggctgcatatgatgatgtatcgaccacttcaatacctaggtgattgaattaccttggaagagggacttttggcggcgattgggcaagaaaagatcacttccaaatggcgtacaaagcttgatctcacccggggctctttcttggattcttccctttacgtgaatcacaggctcacacaacaccaatcagccatcccgacggtaccgagtaccacttcaaatctccacgatggcgtcccaacacattcgggtagccacgccgccctccagagacgccatcctcgaatccctcgtcgaaaatgtccgcgccttcaatgcgcgtctaccgccaggacgcgacaagatcgtctttggcgcgtgcgagctcgaggcggaatgccgctgcttctcaaccggcctggcgcgcccctcccgtgtagggagcagcccgccgagtttgagaccgtcaacggccacttttcagcccaaatgcacgctttcttcaacgcactgcacgacctcgaggacatggcagacaaaccgtcctcggacgacctagacctctgccgcccagacgaatgccttcggcccgtcatatgcgtttctaaccagtccgaaccctatctagactgcttgcaccgcaccttctacactcgctgtcttaccgtccagaacccggacagcctgccctgcctcaaacgcgtcactcacgctcaactgcgcatcctccccgaccgggatcctacctttcacctaatcaacatacggcctgtctccttacgtatacctctcgacctcgctacctacctccctcaactccgcgagctggcctgcccctggctataggagtgccttcccgttgcccttatatctaaggtactgtgtataatttcccgtgtctgggtaagtccttggcgcgatgaccgcgctgagtttgcgtgggctatacgttatactatacccttatggccgtcctcccttactaaggtctatctctggttctggagacctagctcctattagcacgaggtagactaagtaacgtagatacctaaccttactggtatattatcattgtcctcgactaacgagtttaaaggtatgaaccttatgtctcttagcgtttgcctcgtctctgcaacgggaaaatatgcccgccctttgagacgctgagctatttacgtggcttaggtggcggccctccaaggagagggcgaaggagtatgaagggagtgataacgtgcctccaacttcgtatgaggaggagatggttatgcgatggggggtgagatacgaggcgcctgccgttggaggagatgggaaggggaaagtgacatggcaggtcggtgaggactggaggccggaggacggagtcatcaaggcgtttgaggaccttgtggggggagacggggagaacatggagtggaaagcgtttgagtctttggaagaaagggagcaggatccggaggactgttaggaaagaatctcagccattcaacccaaatgacccccctccctcgaatcgtccattctaccgacattttcgatcggcactcgcggtcagagaatcgtgagttcgatccgagcctccctattagcgcctcaacaagagagaacttcggttctcaaacagataagtctcagaccgtggattcaaatatcctccggcatgaacgaacagccagcgatggggacgatctgtgcgactctaatagcccataaggaagggagaatatccgttaccaggtcaaaaatttcccgacaaatagtatcgtccgccccctttgttcaaataaacacaaacaaggaccagcaggcttagagatcatccaatacaatccaaactatatatgcagtgcatcagggagaagaacatatggaggggagacgcgagatagatggctatctaaactggaacaattccttgcgaaaatcccgtctctagaaagttggacttatgatcaagggctgtctcgtgatcaagttttgggtctgagatgcagaaaagtacttggaatagcggatcatactcatacatcgatttgtcaggacacggaagcctggtcacgacgacttgaaggggatagcattattccagttttgcaccatgatcgcgatctcactatgaatgtgagcgaacaagaagagagctatcacaaagttgcatgctttccagagctcatctttatgtcattgtgtgcggctgcgtcccagacaagtgagaatacagccagtgtttacgaagcgatgcgcttatacaagaacacaaatcctcgggaaaagcactcgaagaagcttatacgtggcgcaatttgggcaaatcgctcgatcttcgctttagcagagactacatggggcccggagtgctcgaatgcattcttatttggcaagtataatatttcagatttggcttttatgcaagagctaatcgcttcaagccggagaatctgtctcctcctttgcccgatacgcggagcatgtcaaaaagcggcaagaggtgagcactaaaacggaaagagaaaggtctcgagtgccaggcattatccggtacatatgcgtatgcgtgtgtttaattaacgagaaggaagaaaactccaagcagatttgcgatgaaaaggacaactggttttgatcaggtgatactgttttgtatggcttcaaatgttcagaccaagacaagcaactggacagaaaacgataccgagccatgggtgatatatgaaaaaagcagcacgccgggacaccttgatgcgaatatgttcgttctcttcgttctcttcgttctcttcattcttctcggttctcctagtcaaatcctcaagctcggttcaatagccagcagtcataacccccatcccatgatccagcaagctgctcgaagcaacatagctaaacccaccgaaaggattactctcagcagcgaagtcgtcgtcatccgcgccctttccagctgggaaatcctgtcccttactatagtactcatcaaagccgccggcagtgaccgtcgggctaagcgggagatgggtgaaatcagcggagaagttctcggcgagtgcggggtccgtgacgataggctggataggcgggtcgagctcgcggcgctcaagagcagcccagtcgattttgcggaagaagcggtgcttcttgattatctgcaggtccttctgcatgtggtagccgaggcgcttggagggttctttgcggagtagacgggtaagaaggtcctttgcgtcgggccccaggaagtaggggagcgtgagcttttgtttgacaatcttctcttgtaactttgcgtggttgtttccgcggaacggaggtgagccggtgaggaggtcgtagcccagtgcgccgagggaccaccagtcgcatgcttttccgtacggcttgccttggatcacttctggcgccatgtagtcgattgtgccgaggagagagttgcagcggtcgtcgtcgctaagcgcgatcttgctgagcccgaaatcggttaggaggaggtggccttgcgagtctaggaggcagttctcgggcttcaggtcgcggtagagaacgccgacgttctggtgtaggtgtgctagtgcaagtaccatctctgccatatagaaggctgccgtatcttcttcgaacatgcgttccatggctaggtggtggaagagttcgccgccttgcgcgtactccaggatcaagtaaagcttctcgtggtcttggaatgcatagaatagcttgacgacaaaggggtggcggttgacactttccaggattgtgcgctccgtcttggtctgctcgactagctttttgtgaacagtgagggaggccttccggaattgtttctgagcgtagagcttgcccgtgacgacgtggcgcaccagtaacacagttccgaatgagcccttgcctagacaaaggagaggcacaaagtcctccgctgtcatcttgcggcacagttgactacgcaactccgcagtcatacctgggacatccgccttgcgatcgtccagtatctctggttgaacagcgtcggaactaacaaagtcctgatccagagggatttcatagctagtcaagatttcagtgtggtcgctatcggagtaaaaactggcaacactgggggtcttggagacaagtccgcccaggccagctgtgtcgtcagacagactcaaagtgttaagttgaagcttcaacgcgctgaccccatggcctgtggatgcctgtatcagtgggctagcgccgccaagcgcagttggagggcaagagggagcacgtgagctcgcggcggaaaagtccgattcctcgtcgccggatgccagaggggtgaaaccgcgaacagttgcgcacgccggcccgaattggttcttcttcttcttccgtttttgcttcggcaacatgttctcattgagagtctggtttgtatatccattgaatcccttggttgtctgctctggaggtgatatgcccatgtgtgcattatggcgacggtgattggctgggatgtcaatggcggactgttcgctgtcggcttgcggagcgaacacgtccccgaccgaccagtcgtcagaaggcattatgcttttgctataatagctccgcgagggaagcgaaataatttaggcgaaagcgccggcaataaccgcagggtcaataattgaccttgcgcggttgtaaagaacggtagcaaggtattcagaatacctattttgcagtcgctgttcacatagagaaacccggttagcctcgatcgtctcaatcttagatatcaactgtaaagaatgaatagacgggtgggtgagggttttcacgcccccactaattatcgccaaggtaaaagtaaaaataacaaaaataaaataaaatcggaaatgaaaggccgatcaaggagacgtacttcaacttgcggaatttattcaccaaagcacggttttgcttcaatgtccgaactagtcaatagaccagcctcgaatctctcgagcaggtttaccgtccgcccttcttcaggacggacctaggacccctagccaagtcacctcgctggccgaaaagtcgaaggccaaggtgaaagcagaaagcgctgggtttgtcgcgttcgagatgtcaggaggcgagtttagaagggatggatatagatcaaggttggctagggagccagtaagcgaaatcaaagcgagcgaagacgaaggtacagataggcacatagaggacgaggattttggtaaatagagattaacagtctttcttccccgggaagtgaaacaaagcaagaaaagagcgagatcgtgcagaaattcggatttcgcgcagatccgggggctaagcgactagtcccaatttggatttcacgtgtcagatgctgacattagcatgatcttattggatttatatgttggtattgtcttgatatgtcttgatattacagtctttttactttgactagccctcgatatcttgccaagtgagacaagcctcaatattacagccaccaactcgcatgactgtcgatctcgcatgactgtcgatctgcatactgcagcctcctgtgtaacatgaaccccttcacagccctaacggctattgaagaaatccttcgagcgagtaatctccacaccagaccgctggacaaaagcaagagcacttggcttttccaccttaaccgtcacatgctcattgccaaagtcgacagtcacaatgcgagcaatgaaagtggccaaagactccacagactggaaatcagtctgatcaaccttctataatatcaaaatatgtcagcaaataagaccccagaaaaatataccaacaaatgcccagagagatagaaccatacctcagccacagcccgcgtcacagcctggtaagtatcaacaacagccgacccccaagcaagctgcccaggaccctggaacgtaagaccaacaaccacagcctgtttctccagcctctcatgaggattcacaccgaggatagcatagcacctaataccctcgatgcggaactcctcctcgagaaccaccaaatcgcgcgcctccccaccagcaccctccttcccgagcgcaataaccccccgataccggagcccctcatccgcgcgcaacaaagccttaggcaaatgcagcagcacttcgcactccccatacgccgccgagatagggttcggctgcttctccgccgtagcagccgacgtcgtctccaacagacctagtccggcgtccgcgacaacgcccgcgaccacgcgcagatcctggcctaggccgcggctatgcatgtcctcacggcgcgtcccctccagactgatcaatcgctgcgacgggtgcgatgcggacgaggtgtttacgcccatgttgcgcacgtcgctttctagtcggcggaagagcttgccatagtcgagggttagggagacgttgtcggtttccgcggctgtgattattgaggagtaggagagcttgagggttgcagtgcagggttgtgattttccctggcggtgccaggcttctggggcacaggggagggggagctcgatgtcgcggagacggacgctgtcgagcacatctgggcggggtgggagttggatgggtcggtcggtcatgattgtatttgtcttggtggtttaaggaggagatggttaatgcgaaattatcaacaatattaattagatcaagggaaactgagaggggaggtttttttttggcggggcacccgtggatggttgtagatcatgacggtagaatccacacgggcatttccgttttatttgtcgcagaatcatagattagatggagactatcggtagtattatgggatattgtttgtatttttgttcactacacgtgctagaattggtttggtggagattgtgataatatatatctggtaatatatatctgggtttaacatggctccgtacccaaatttagatactaggacgttacgaatcgagaacccggaatattacaacaggagaaaccaaccaactaaaggaaaagattaagattttcggatgctaacacacatacgatagtccggggctaacaagacagaccaatagcgataaccgcctagcctccagccaccctaaagctaccagggaagaaagaaaagattgagcactcgcgctgtccagtcgtcaggaagaaagaaaagcacccggccgcaagaacgctgaacggaacctcggcaggtgaaaaagaatcatgacaccatgaaatcagtacgagacgttgcgggtatttggcgaaggaggtcaacaaaaaaatgatggtagaacggaagaatatgcaataaatccaatcaacgaagacccggcgccatctaccagtagcgaggacggtcgtaaggcacatactcgcctcttggtggagagcgaggacgaccataaccccgggcagctaggtagggatcatcatagtggcgagggggtgggggaggccgggcctcgtaggggtcttcgtagggacgacgtgggggtgggtagtcttccatccgagggcgagggggagtccggcgggcatagccatcccgttcatagtagggatcgcggcggataggaatcggcgaccgctcacggtagtgctcccgcggactgtagccacgtgggggagggatccggcggtcgtactcctccatgggggcagggtaggggcgacgtggtggggaacgggaccggtatgggtcacgaacggggcgttcctcaaagttctgaatctgggatttggtgagagggggttcctctaggtccgagccaggttggacgcttacatcggcgacacaagatacgacggagcccttgaactctcgctggtccagtttctccacggcggtcttcaggtcgttggcggtttcaaattccacaaaccttgttcaaatgtcaatggattggaagggtctcggaatacaatggttcacccaccctctgccctgttctcggccagtttcagagtaaacaacgtccagtccagactggcgggcgaagtctttcaagtcctattgaatgcatggtgagtccaggtccaggaaaggtatgtccggtaaatgtggtgagagaaaatgtaagcactcccatgtccagtccgagggggtgtatccagaatggccatcttatatatccaaaagtcccaagaaaggttccatgggtctgacaaggtgtggtgagtatgcaaggattaaggagcaattcttaaatctcaaggtaaaagaaaaagctatagaagcatttctcggttatcaagagaggaatgataatggattagtactcgatccttggctcaaccgatggccacaaggacaatggactggaagcatgtgtgggctgaatagagacgggtttgaggaatatacgtcaggaactccgggaaggaatggacttgctgctaacctgccaacttgtttctggaagaccggaaatctgcatgcggaacatagtgcgacgtggacgagggagcgcgttgcggtcaggcggtcccgggaaggcttccttgcgacgaggcccgcgcgcaaactgaacggtgagtcgctcgcctttgaagtcactgccgtctgtagtatggataagcgaggggtcattgggtggaaagtcatgggggggggcatacggaaggctataagaaaataatgttagcgactttgcgcgatgaagggaatctgataagccattcttaccgggcacaatatctctggcatccagctggtcgtcgtattcgatgaagccgaaaccgttcatcaatttgatctccgtaatcttaccggagccatggctgctgaaatgttcctcgatgtcgcttttggtcactgtgataataaagcagaaagaggttagcgcatcatttctccaaagtgactccaaaagcaccggttaggtggccacccgaggcgctgttccatgtgggtagcattccacatgagcatacgagaggtcagagcacatgggactcagaggatcagcgaagcgaccagattatgcacggtggtgcgtgtgttctccaaaactcagggaagagggacagtcaggtaccagcataccattgcggggaagattcccaagataaaggcgggttgaggatacctcagtcatggctagtctgaagcgattgatgagcgaggatagaagggaacctggctaaggcgaatcctagagaatatggatgagatcgaaaaggcgggagagcagagagaagttgtcagttgcggtctcgctgcaggaaagcgtgtaacgtgtaacccgacaaacgagagacgggtagagggtagatgtactgctgcaaagtcaaacggctgaacagcagaacagcaaaacaaatacaaaagataccgaagcgaagagcgagaggggaagaaaagaagaaagtaccgtctggcggtggacagagggtggccgcctcactttttctgatccacgtggttccaccatagtaaaaatagaggaagagagaatatgaaacagtgattactatatagagcgattaattagattacatgtactagctacaatacaaatatatacctccatagtttaaaggaagtaaggcttatccctcgtggactctctccactgtcattccacggttctgccaaccccatggggtctttttttggttaacctgtttttcctatttgaaacatctatatgtacatttggttctcgaaatccaaccattctatattaaagcccctggttactatcatgggatcacgtcatgacgtacttgggcccctctccaccttgaggagtcacccagttaatgtcttgtgtgggcaccttgatatcacaagtcttgcagtgaatgcagctggtagatagttagtatacctctctatccccacgataattcaaatcgagaaacttacttttgtgagttgatctggaatcggaccccgtactttttgctagggtcctccacgtattcgtagacgcctgcaggacagaaccggttttcaatacccttgtaaaccggccatgagaggtccgtatgtttatccatgtccttcacctgcaggtgaaccggttcgtcttcctcatgattggttccagtccggctgacactggtcaggatatcgaaactgatcactccgtctggcttggggtaaacgatcttctcgtattcagaagcaggcctggtagctgctgcatcagtgccgtggtggctgagcgtccagggcacccggcccttgaacaggtaggcctccagaccggagtagagaagtcctccgaagaagccgaaaggggtgttgaatgagggccggatgttccggacctcggaaagttccttccaaatggatgaatcccgtagagatttctcgtagtcaaacaagaagacggtgccttggctctcacccttaagcgccgagtaggcagcctcggcggctaacatgccggatttcattgcggtgtgggtacccttgattttcgggacgttcaaaaagccggccgtgtcaccaatcaaggcacctccggggaatgcgcacttcgggatcgactggaatccaccctcgttcagtgctcgggccgcgtaagaaatgcacttgccgccctcgagaacctccttgaacatggggtggtgtttcaacttctggaattctccatacggcgaaagccatgggttcgggtagtccaatcctgtcaccagaccgatactcaccatgttatcgccaaagtggtacatccaggctccaccataggtatccttgggaagagggtatcccatcgagtgggtaatctcgcctgatcggaacttctcgggctgaatctcccagatctccttgattccaagaccatatgtctggggctggcagtctcgtcgaagatcgaatttcttcatcacctgcttggtcaagctgccgtggcaaccctcagcaagaagcgtgatgcgggcatggaactccattcctctctcaaatgtctccttgggcttgccctcccgagtgagtcctaggtcgttggtcgcaatgcccttgacggagccatctgtgtgatagaccacctcgctggctgcgaacccagcgtacacctccacaccaacctcttccgcacgctctcccagccacttggtcagctcgctcagactgataatatagtttccctcgttgtgcatctggggcggggtgggcagcgggtacgagccagtcttcgtcaggaagcgcatcttgtcgcctttcgcgggagtcgcaccctggaagcgcgaagggttgtcctcggccagccagtcgggaagcagctcattaagagcggtcggttgcagaacgtttccggagacaatatgggcgccaatttcaccggccttctctagtagaacaacgcggaactcatcgttgcctgcctcgttggcaagttgcttcaagcgaatcgcggcggcgagaccggcgggacctgcaaaccaaagcttggttaggatatatacttggagaaccaatgtggcaaaaaatcacataccaccgccaacaatgcacacatccacgtcatcggactccctgtctaatgtgcgaggatcgaagtcgccattctcgtcggtgaagcgctttgacagcgattgcgaaaaggctcgtgtctgggttggcgcggtgaatagtggtgttcgccgagctaaacgtcgcccagaaagtgtgaagggactggctgtgtgcgctggcgtagcaatggagacggaggaggtagctcgtgcgaagcgggaggatcgaagttcacgcctcaatagaggcaagacggcaccttttgatgccatggcggtgtaaatggttcaaagatcggaggctgagacctggattactttgcgaccagtaattgagctgatgcggggactcaggatatttacgtcgtagatcccgagtgtctccagtacccgagttctgagtggaagtgacaaaaacgccgaaaaaccgcctggctaccctcggctcacttctttcagccaataagcagctgggcgattatccaacttccaggcctgaggcagccatggatggatgccaccgcccgaagtgggaatcgccactagccgacgccgacgaactggtaggagctgggcggtttctttagtatatttagaataatatgcactggctcaactcttatcacatttatgcgccgcggcttgactgaacttggagcccctggcggtatcctagtatatttacggagaagtataagtagtctgcaatgcccaattctcgtcacgtttaggcgcccatgttcaatacgatatagatactctgagttgatcacatgcatcacatgcttagcttccttcacttgtgatagtgaaacggaacaatattggcattagctctagacttattgaaattgcatacatatctatatgccagaaacaagcttaaatacccgagtcatactgtcaaagcagaatgcagtttcccgtattccgtattattactacatttcgcggaatgtgacgattatgccgcttcgggtatggtattcagcatactataccataccataccagcataccggaatccgctagaaaatgtaaaaaaacatgtgacctgagagttgagaataacaaagtctcaagaactgagttggtatctgtatgttgtatgttgtatgttgtagatgaaaatagattgcagggagattccaagaagttaaaaaaaagaccgatcatcgttagattgctcgcagattgctcgccatgagattcatccagccttggcagacagtggatcaacgccgcgggcgtcaaaacggccacctgtcctgatcgaaatctctagggagagtcattgatatgaaaccaaaaaaagtactccgtatagtcggatcaaatataatttccgagcgatataagctcctatcacagtcagtttccaacaagatccggtataatgaggcgattatagtgaatccccagtgtagtgaggtcagagagtaggggaggaaacaaggcaaaaaaatcagaatttttgttcagttgccatccgttaaagcggcaagaggatagcgcgtcgtacatggagtgaccgaggttagtcgatgacgatgattggactggcatgggacggatggactatcagctgcaggaggagcgcggactggcaaactcagacctgtaacccatggcgccgcggaggataaagcaagggtgtttgagccagtcaggggccgatacagagagattggcggagtgcgctgggcgaatgaaagtgaccaacgatgttgtgcttctgtgattggctcacagggtggtttcccagagccgctagcgggctctgaagccaaggttgaagggaccaaagtgccgctgctttaaccgccaccggtggcccagcctcccctgactaggctgtgactcagcactatataaagacccaacctccccccaatttaccgtgggaattttgtctcggtcttggcggatcttatttcggaaatccttcttccctccgctcctctcaaaaagcctcttgattatcaaattgatcttgatatctgctggctttctcttactaatcagatctatctcacccagatctttgattttcgagacccttgattttatcaaagggaaaaaaggtttcttggtccacagacctaaacgtccatagaagtcgagcctcaggcatcacttcaccactctctctttttcagatcgtgcagatagacaatcccattttccaaaaaacagggcaaaacattttcgaaagaaacaaaaaaaaaagtgccgtccttccgtccataatatcgccgtcgcgcctatcttgagaaaaacactttagtgtgatttttttctcgattcgttcaccatcgactgcgttgggtttcgttgcatatactatcccgtggctgtgattcacgagaggttacgtgcgaacacctcgtagggggatacattgagttgtccatctcccaggtaagaagctccttctgtttgtgtttgacgttgtgccttcctttttcttccttccgcgttctttccctcgacacaccttccctattgatacgttctcgggaatctttccttgttgatattttctcttctcctcacgtgttcttcttctctccgctgctctgtcacgcgtcgttttttatctcgcgacttttcgcgactcgagctgacagatcttcttgatcagttccatctttattcttgtcacaactcgagtattccatcatggattctctcaccacccacccctccaatgcgcagcaggctcgtgccttcactgccacctcgtcgctgtctttccctggtggtgctggggatttgaccccgcctaactccgacaaggaggccttggcaatggcacagggcggaaatggtatgaatggccagcaggccggagcaaatgccatccatggcaccggggtgactcccgcttcccctgcgacccccgccgcgacccctggcgccactactggaagcagtggcattgtccctaccttgcagtgagtatactctggacgtttttctgggtgaccagaatggctgaactagttattccaaaaggaacatcgttgctactgtcaaccttgactgccgtctcgatctgaagactatcgcgctgcacgcgcgtaacgccgagtacaacccaaaggtatttattattcctaacattgctctgagagcgcacgcatcagggtacaatgtggctgaacttggttctctccttagcgttttgctgccgtgatcatgcgtatccgtgaacccaagactaccgctctcatcttcgcctccggcaagatggtcgtcactggtgccaagtccgaggatgattccaagctggcctcgcgcaagtatgcgcgtattatccagaagcttggtttcaacgccaagtttaccgatttcaagatccagaatatcgtcggctcctgcgacatcaagttccccatccgtttggagggactggcctctcgtcaccacaacttcagctcctacgagcctgagctgttccctggtttgatctatcgcatgatgaagcccaagatcgttctcctgattttcgtcagcggcaagattgtcctgactggtgctaaagtccgcgaggagatctaccaggctttcgagctgatctaccctgtactttctggtatgtcttgctggattcgctgccaaacctttactgacttccttcttagatttccgcaaggtttagaaagttccagggaagatcactctatgcgtttcaaacctgtattaacattgctttttccctttatgaggacagtcgtctgaggtctgtccgtatctcgcttttccttcggttattacgactcttttcatgcaagcatagttgggcgtttttagcgattcggatgatccccggttttctcacactttcgcgttcttccacacaattagattgctgcacaccgcagtgaggcggttgtgcgccggtcgatgactgcctcgatttaatcatttatcgttctacaatctgtggaggattttattcccacgggccaaaaaaattaatggtgacctaaggcagtctgttagactcagctccgtccttgttttcccctccggggttgatggaccggctttttgccgtgatactaccttttgagtagtcaatgcaaatgtcttaaaaaagaattcctctcgtactcgagtagatgtagtttgtagctcaagccttgatctgtttatagtctaaatgcctttctttatacatccaatgtctatgctatatacatctcatggaaggatacttccggtctagagcacactgctccgcgaagccttccttgtcttcgccaactcgtctttcagaatcggtctcctatccccagatcgactaccatcgccatcaaagtcctcatcattcgacacagcaacctcgggccaagtccacatcttgcttaactcggaatcaagcgtgccctccagcgcatccacaaccttgtctccaataacagggaagaacttaaacgcgtggccgctaccaccggtagcaaggaaaagaccttcatggtcagggtgataagaaacaatgaagtcacccgtgggcctgttcaacaaaattagcacccagtccacagacaactaaaagaccaaactcacgtatcagtataccaacaaaccctcgtattaacaaactccctctccgcaaaacgcggcaacagctgcctcaaggcaacgcggaacgcatcctgtccttcaagcggcacaggtaccccattctcaggcagactaaccaccatcgagccctctccagcaccgggaaccggcacctcaacgggattgcgatacccaaacgcatggcgcgcaatcttgagcagattatctcggggcgggataataaagatgcccgtcgcgaagttcaaaatcgtcggcaaattctccagctcgcgctgctcctcatccgagatgcgcatataagcaatcgcctgtccggtcgcaacagcccggccgcgcaagtccaccagcttcgacgtccacgcgccagtcgccagcaccaccagatccgcctcgagggtcgaaccatccgccaagacaacaccggtggccttaggcttggcaccggtcgtgtcatagagcacacgctcgacatcaccagtgcggaagatcaccttcccctcagcgtcgaggacgcccttggcatagcgcacgctggccgcggcgtcagaccacccagacccccagttcacgtagccgccggcgacatcgagcgtcgagccgtaggccgggacgacgctgagcacgtccgcttgcgtcggcaggaaggtgacgttgtcgccgagctggcgcacgttggcgtagctcttgcgggcgtactccttcgcgctggcgctgttctctgggtacacgaggagcaggccgttctgcgtgtagcggccgtcgcggccccagtctgtgctacgccagcgctcgatggcggctgcggcgagcttggagtaggccgtgttggcgtagtccgcccgcacgatccgtgatgtgtccacagaggatccgtgcgggtttgggattgtcggtgaggactctacgactgttacttgggattctgggtgtcgctttgacagggagagggcggtggatactgggaaatgttagctgtgtgggaattgatatcaaatgcgtagtgtagtgtgatagtgtagagtgctataggttctattattgttcacacttacatccaaacacgccccctccgacaatcagaatcttcgacggcaatgccatttgcaaaaatatgtgtgtttgtgggttaaacaccagaattggagatcaggagatggatttctccaattgatagataacacgccgataacggcattgctcgtcggctcagctcccgacttttctttcctggtcgatatcgtttctccgatctatacggaatgagatgtgcgactgagctcgggatttgattttgatccgttcggttttcatttcttctgcctctaactttcctttggtctcgcgggctgacaaccctgtcgcgtaagcactcaatcttcgcgtcaaaccatatatgcacaacaggctacacaaccctcggcagtccattctgctagttcaaaacatcgtaatgaacgtaaatcaattgcgccgagtgccattaattgcaaagtggcccgtcacaccccgccgcagcgcatcaagcaaagcacctcgacccaagccgaggcatgtaaccagaaccattcaatctcaaccccaaactgacaccctgcagtccccaaaaatccaaaccagtggcgataaaacggcgtcaaccaaccccgcctcgccaacatcaccccgagcgcccatcctcacagcccgaaacccccgatgccgcaacagcaaaaccaagccatggcatcccacccagagccctaaccttcctgggcatctccgcactcaccatcagcacatactgcggctacctgtacgcgtcgtacacgcgtgaagtaagcaaagcgcaaactctcgacgtaccgcgcgatgtctcagaccgctacaacacaacagcggcgaccttcgacgcagacgtcgagctctccgaaaaggcaatgggactcggcaagaagcggcgagatctagtgcgccaggcgcgcgggaacgtgctcgaggtcagctgcggcacggggcgcaatctgccgtattatgagctcggcgagcggcgcgggttggatgccgatgggcacgcggccgtgctgggttgtcgctcggttacgtttgttgatcttagtccgcagatggtggctattacgaaggagaagtttgagaaattgcatcctgcgttcccggcggtgtttcgcgcttgtgatgcggggaaggttgagccggctgatatcgggcgtgctgggaagatgcaagcgccggtttactttgataccgttgtgcagactatggggctttgctcgatgccggatcccgttgctacgctgcggcatctcggcacggttaccgagcctgtgagggggcggatcttgttgctggagcatgggcgttcgtattatgattgggttaatcggattttggataatcttgcgccgtctcatgcggatcgtcatggctgttggtggaaccgggatattggggagattgttcgtgagagtgggttggagattgtggaggagaagcgttggcatctggggactacgtggcgttatgtgttgagaccgaagcagagtgagaagcctcagtcttgatatggtgtggcttggctggagctatgtaacataatttggaaatgtgtatgaatatttggcgtgataggaatggattcagaatagactatagaattcaagtgatgagcaagaacttatctcggaaattggcctcatccatattcatccctctgtccttaataacgatatctgaagccgggcgtcttccaatccgtgacatcctcatagtcattcgataccaattgcacccggttcaccatatccgccacattattcgaatcgtcagcgtccaaccccttcccaccaacagcacccgagtttccagcactaccctcaaagccctccagacgcacacggcgagcattagaccactgcaagtagaagcgcagcaccaacgccaatacgaccgccagggcatagcaaatcatgatcgtgcggaaggccgtgttataagtcggggcctcctcactaaggaagaactgaggtccagagatatttccagcgcagtaagccaggaagagcattgcagtgactgtcattttcttagtgacaccacgataattagcctggaccagcgacatggcaagcggcattgcggccggaccagtcgacaagaggaaatatccaaagaattgcacgcccaggacgatatgcgcgcgggagtagataatggcactgccgacgacgcaagggatcacaacggccacgataagcaggcagttcagttggcggaaacgaccggccagccagcccgttccggtgattgtggccacggtgatgagcgagtaagggatggtgagcagcgtggattgcaagtttgtgaagccgaacgagacaatcactagattggcaaagttctgcgttcctccgttggggatctgggtgcaaagctccagtccgaatataagccacgtctttggatccatcaggcattcgacgacttggtcccatctccatgcggtcttctctgttgcacctgtgcctgcaatgacgactcggttgtttgcaaactggcgttcctcttccgagaggaatttagccttggagattgagtctggtagtagagcccagacagcgaatccccagaggaatgtcgcgcagccgaggacgatgaacatccacctccatggcccgacgttatccttgacgtgacctagtccgtaggcgaggagactggaaataataccaccgacactctgtaaagatgagcttttattcaatatattgacaggaacaacatacgtttccggcgaaccataggcctgtcctagtagggatctcgtcacgcgtgtaccacgtcgacgtgataaacataaacgccggcgtgatggttgcttcagcgactccaagcaagaagcgaactgtaatgagaccgccaaagttggtgcaggctgcagtgagggccaccacagcaccccagaatagcgtgttggccgtcaagtatttggcagcgggcagacgggtaatcagcaaggttgttggatatacccagcccaggtagccaaagtagaagattgatgatacccagctgtactgttggccaaccaagccctaaaaatgatattagttgtggttcttgtttgttctggacatgttcttacagtatcgtccctcatcccgaagacagatgcgctggacaagatggttttatccatgaaattaaacatataagtcgtgaaaagcagtggtaccagtcgtctgtcaatcttcctcaggactcttttcgccatagcgtggtcgggggtaattgtttccatggccatttttagtgaaaagaaagggaatactggatctcaagacatttgaacacttgaactcttcttattgaaaagttcatattcccctgttatctttccccgcaccggtaatttgtccaacctatacttgttatcgccgtgatcgggcgccaattggacgaggatgaagccaagtcctttagggctagagctagtagctagtatggacgatcttttcggagctcttcttctactccgaacccaactctgaatttgacatcttgccaactacttactccgaacttgtattgatttcgccgatagtgagaaccacttcagcagtaatcatgaacggcctcacaatcaccccgttcatagccaatcttcccaaggtcgaactccatgttcacattgaaggcactttaacaccctcactccggtgggagctatcccaccgcaacaatattcccctcccgtacgccaccttctcagacctgcaagcctcctacgcagtaaccctcaaccaccgacctgagctcaatggccgccaacctggtatcccaacctttctggaagcctatttcgccgggtgcgaagttttgcgcgcagaaaccgacttctatgatttagccatggcctacctgcgccgatgcgcagccatgaatgtgcgctacaccgagccctttttcgacatccaggcgcacacacgtcgcggcatccccgcagaagctgtcctggacggatatctgcgcgcgcaacacgacggtgccgctcagctgggcgtgcattcgcgctggatcatgtgtttcttacgcgacgagcctgtgcagcagggtctagatgcataccgcgaggcgcggccgtgggctgctggaactgttgagggcggaaagggcctgtttcatgctgttgggttagcgagtaatgcgtacgagaggccgccgatgcttttcgaggaggggtttgcgttggcgcgcgcggatggcttgcatgttactatgcattgtgattttgggcagaaggatacgcgggagcatgtagcgcaggctatttttgaggtctgtgggggaaaaggggcggagaggattgatcatgggttggatgcggaggattgtgaggtgttgtggcaggggttggtggataggcggattgggctgactttgtgtccgcatgcttatcatcgaaggacggcgacggaggttttgtttccgaagattcggaggttggtggagaggggggtgaagatttgtattaatagtgatgatccgactttgatgcatgatgtctggattgatgggaatctgcagaaggtctatacttattgtgggtttagtcggggagagatggtgcagctggcgaggaatgcggtggatatgtgttgggctgaggaggacatcaaaagggctatctatcaggaattagttggtgttgatatttgtgaataactttcctaggagggttgacttccccccaaacgagatcctgacacggaatgttccagatgactttttcgaaggcaaactgagtaccttgtttgtttgataattgtgagaacagcaggtcatgtggcagtcttacccctcttctattcaacttagtccttcatcctcttcgactttcatccttcttgatacctgatagttacatcccatcaacactcatggctcggcctctgaggatgatttcaccggccatccactgatgatatattctgtcatctctatacaatcatgatgtgaactcgctcagctactgctgatttccacgggagactctgaggtccgggttttccacactcaccttcaactcgggctctctctctctctctatatatacggtgggtcttatcatcaccctaacctcttcccttgataactgctaatctacgaaggcaaggatatggaactatctttcaacctacacaataccaaaacaggggtcgtcaaatgagagccagccggactccaacaacaagcagaaaacgaacagaaggccagctatatcaatagctatatagaggttcgcagaccaggccccaagcaccaagacctgtctcaacagagaaccttgagcatatactatggcttggaaggaatcgtatccagcgccttgtctcaatatacaggtgcgaagacttgggaaatgctccctatctctttcctcgaatcggatcgtggacattcggtatcccgcagggcagtggctagcctagccgctttttttacaccctcatctcttctttgaccacgagtttggacctggtttctatactaccccctcactcaaatatatcttggaatacgatggcctagatggtgtgattttgattttcaatatctttcgctcgcaaaacatgatgcgggggttcgaaccgaatcttcgactatacattcaagctggaaacaacccaaagacatcttgtacatgctttcaaagagagcatgagaaagacatcaaagtcgcgtggctacttccagagttgcctgattctacaatatagtaacggcagcggcccaagagaagctggtgcagaactacgaatcttccatggcaaccccttccgaggagcgcagaatctgttaataatgctggaccggaattgaccggtcttgtggttcgatcaagtgatatatgatcgagcgattccttgaagcgaacatcggagttgactaaaagaaccgaagagcactcttcctgaccttctgccacggactctcaaaccaccaccttctcctagataatggtaatgattgaagggtctgggtatccttactttgaaaggcatccttgagtgcttgtcgacattacgctcgcgtcaactgtgtttatttcggccgagttatgggtgagcctgctcctagtgagccaacgtgaacgaagtatgcaagactgagctgagccatcgtcaaccgaggaaatatgagtgtgcctgctgttactgagccggctctgaatgaatcggacctgacttggcagaccaagaccatgctgttcagagcctgcggaccggtattcgttcactcgatatgtttcttgcgacgcgggcggcagggagtcaggctcatcctagcatcatggcttttccttggaaccacacacatgttagtatcaagactgacttacatcactccaccctcagaatttgtctgggaaatgctatgtacgttctatgtgttatcctatccttctagaaagtggcgctaactctttcacttcaaaatagttacccgaaatcatcagggtatcgccgaaaatccgtcatctcacctccgagaacagcttattctatcttctttcgaccgtaagacacattggttttcgcgacgaatcaagtgtcagctctgtgttgacacctggaaacacaatggtttctaacaaagatggggaaccgtatcatacagagcagccatgagatgtgtggttcagggtcctgcttgactttccaactctccaagtaggacccaatcacactattggtagtgaaatacggagtactccgtataccaggtggattttataggaaggctagagccatgggccaacttcaagccgatgtgctgtcgtcttgtactcgccaaacccatattggagccacacaaccattgattatgaccatgagtggccagggtgcagacaattcggtcttgcggtcttggaagtggctatgcagaaaatagaggaattggggtggttggtgttgaagattgcttttgaggcgattctaaatagacatatcctaccttataagttatccatgattacaagctcaataacaacacagcatatctccaacacaagacccggtatggaacctggtatgtgctcataatcataaagcggcacccgatcgggagatccccgacggcctagaatcgaatagagcgacagacaacatatgttgcgtggactagtacggagtagccacccggcagtttgtcggcgtggattggctgatgcggcatatcgaacctgtcccgcattcaaaacgggttttcgccaccaatccccatcattgattctcatgcaaggcgcagatcttttgcaggggctgttggatgcattctttgtttgcagttcggtcgtggtgtggcgggaaagttggaaccgaggatagtgagtttaggtaaggtttggatagatgcatcgattctcgaggggtggtttcattggttgtttagattgagatagcatatctgatacacgcaagctatctacaataatatgatatacttttgaatgcatagctggtagataatgtaaacataaggagtacgctagttaaaggggaagtggacattgtaggtacctgcggttgtggaggtgcggagaattcccgtgcgtctgcatggacattgtaggtaatatgtcctgcctgtaaagaacattggcagaattcgacatttaatgcgatcagataaactagttcactaaggcaattgttccctttcggggtgacaatggccagttcccatggttgacgatcccgatcccctaggcccaagtggtcgatgtcatgaaaacggagatcagagcaatgccccactatgtatgtgctttctacaatatatgtacggagtacatgcacagatcgcaggggtaccttcaagaatgatatcttgatacgcagtacgtattaccgagacctacagcacctgggcagcaatgcttgtcagtaatatatacatcccttgctggataagagattgggcgatgatgtacaatatacgacgtactttttgggtacttttaggtacttttgcaataatatcccaactgatcatcatcatagagatgtggatgagggctccgaaggatgtcatatgcacgtaggagtatacaagtgttatattctttccccgatggcaccacttttcagaggcaactgcggcaagattggctttggatatttataatttcccccaaacgatagatctcaatatatggtagctgacagtgagatatacaaaaacaaggtctcggattttacatcatcggtggcaaacgttccttttctccccgagacgctaatgtgagcatcccttactagcgtcatgtacaatacgatacaccgactctgattgatcgttgtcccgtcgattgggtccctggggtccaccgagaagtggagcccggtggactttaagtggccactccatatcttttttttttcttttccgtttcttttccttttctatttgtaacggccgcgctagagagcgcttttgggtctcggtgtttccgaccggagggttcggcttaaagccttgtctttttttcctggtcaaaaccgacggactggacgtgttgatggtggttttggaatttgatgtcgtgtgtgtccatgctcaattggtatacttgcataattagtttgttgtacaactccataagttaataataactatattttgatctatcaacagcggtgtgtttctggctcccccagcaaccaacaggtgacagatcaaataatctcccttaccagtctcctccgtacatatcccatgcagtaggaaggctccgagttcaacaagaccattatccaccgtgcaactaccaatcactggatcggtaggtcttattattcctcaaagcatcggcttgtgattagcgggctccgatgtaatgcgggatgggctaaccactagagttgttgggtgaacggagacgccaagggccatggagcaccaaaattggacttagtcgggtcgtagaacacatggatgccccacccagctgtttcggtatgcactaagaccgaagatagaagggaaagaactatggattcgcatactaaggcccgaagaggaatggggtgatccgcactgcctggggattgttccctttttgcctgtgcgtgtcgcatgtcgtatgttgcattattctggcgtggatatagcggtgaggcgtgtagagtggtgttgaagctaggtgggatatatagtgctaagtacaatatactcccgagtctacgctgtagataggcatatgcgcatgtacaagtacagacattcttaaagaatcgaaaaggaaaaagaaaaacaagccccagaccagccaatcatcgctagactatttcgggaggctataataccgtacggtaatttacgccgccaatttttctcaattttcgccaatttccacttttcccaattcctcaggcccccggtaatttgccatacaaacacgctctgcctgtcgcatcttgatgatcccccccatttatccttctcatccccctttctactaacatcccccatatcttagaatcgtttttattattatccttcttattactctgtttattattatattctcttcgattatatcctgtgttttatcgtgattcttgattcttctgctctactccctcacaatgccgtacaacactcgtcgcaagtcactatccctcccgtccttgggaattcacctcccaaattccactcgtcgttctccctctatctcaaaagtccacagcgatgagcaacccacaaaaaaagtcaagagatcgcacggtgcttcattatcacctgaaccctccgacaagatgatgcgcgctggccgacgtggactctttgagtttacaccgcccccttcgccgatggatggagtgcttgcgcccaagatcgatacagaaggaattaacgacgacatcgttatcgctgtaatcaaccaattagagaagactggcaatcgccctcatctggtgaaagaattggccgcagtcctggtcacactaaatgtcaatgtcgcgaagtatgtatccactctaggcttcctcaaaacacgatcgctaacatctcctctcctagttccgccaatcccgctgcgctgctctcgtcgcgcttagctgcctatatgaagcgtccttggaccgccctctcgccatgtccgatggccaaggagcttattttaattcatccgcgcaaagtgtactactatcttactacgtttccccaccaacccattccggagaccgacgatctggtatctgccgtgggtagtaagcacctcacacccagtgtgtccagtctcgaggatgaggaagacgcgatggtgcgggaacgtagccccagtcccgaagtggacttgtcgtcccccgacttcgaggagcatggtgatttgaacccctcggctagccatggcggttcttctaatcacttctccaccgctagtaatttgacgcgtcttatgaactcgcaccgtgccgcttctccgcccctggagggtgacgagaaggaattcacacaaactgccagcgccgtgcgtgagcgtgcatccgaggaaaaagccgagtcgagccgtagccagtccatcctgtccgagagcctgagcgccttggaggaccgcgatacgcgcatgtctgaatcgcctatgaatggtggttccatgtctccgtctctgcctggcgacggtatgtccgaagaagagtatagtgactacttctcgcacatgcccatcgaccaaatggcccaggatctggacgaggctgccgcgactgccctgtttggcacctccccctctccttccctcacctctatcgcatcgtctgtctcgtctggcacgagcgcattgacagatatgggtgtggatggcgaggagcttgccggcgctctggttgccccccagatcagcctccccgaagatcccgatgcggcccctgtttcgtccctcaagcgctcgcttgatatgttgaacagcggcctcccagatgtcgacctgaagatgtcggatctaacggaatcgcacgagaggctcacccttacccctcgcgctatctctatgaactcggagcctgtcttcgagtcctggagagaattgcagaacccggagatggtggaagtcgacgagctcgacgagatgtttggcgaattctaaactatcctcgacctgagtccatttatcccgtttatggttccgctcttctcctccttctctccactcctagccgggctgtgtcccgtcatgttctctttacctcttttacgtcgcttgtacatgctcattgttttctcggcgcaactttcggcgcacccttttacttttcttatcgctaatgcctattttccttgtatatatacatttgttttggactatctaccctggaagggtagattgggaggatattcacgactggagaaatggctttacccaaaagtgtcaaaaatactagcgtttcttctcataaattcatcttttctcatcttcatccatggttgtagttgcaaaagagacaacggttcctgactaagcagtgcccaatcaggaaggcgggcagcctatcatccatgggcagcagcctagagcccacccgtgggccgctttaacagaatccgccactcgactcggctttgtactgtattttctttcttccgcgggacattcgtacctcgaaagacgggtctcaaatttcccttatacatacatctcctttcccgacctcccatatgcaaattcagccctatcatctgtcacaactttatatacatagcgccgcaggaacccaatatcgccaaccatactctcgccaacgtaaggacttctgcgacaatgacggccggagaaccttcgcatacggacaaagacggcgccgttcctccacgcgagacgtccaccaagcaaccaacagcggacatcgcgcctgccggactacgccctctctccatcgcaaatactatgtcaacaataggcgccaagagaaccaatccgggccaggcttccttgagcaagacaattgccgcatcacaaactaaagttgccattccgcgtcaacgggtcgccgctgccccgcgctataatcggcgtgtgccgcgtgcttgttcgtcttgcaggcagcgcaagacgaaatgcagtggtgatacgccgatttgtcgtcagtgtcgtgaattgagggctacgtgtagctacccggacggttggagggagaagacgaaaaagtatgtataagtgtatctgtggctacgcgagccagtatgctgactagctggttacagacaagttgaagccctgtcggaaaaagcgcaagaatatgaaaatttgctgaaggaattgaggggtatggttgagtttagtgccgcagagcggatcagaagcttgctggacaaggtttgttcttcttttgggttatcggagtgttgctaacactcgtaactatagtatggtccggaggtggatggttcttcgcaatcccaatcccgatctcaatcagcaaccccgcaagatgacattccagaaaacgatgaaccatcctcgccttcgtctattgggtctcttgaggcgattgatcgagtggaagaggatatcaatcgatcaccacatgcaagagcaactggttatatggggaaaaactcggaaatcacctggatgcaacggctacagagagaggcagaccaacgtgctcaaggtcttccggggagtttggagtttggccaggaccccaagattgataatgcagtggctttgcatgcggtcaattatcatcttgacgacttggatatttccgtgcctgaaccggtacagctgtatgccatgcctcctcgagaggtcgcggatcatatgttcgaggcttatttaaccactgtgcatccgttctttcccatcatcaacaaacctcttttctcagcacagtaccggacgttctttgacagcgctgctcgacccggtgacaagtggcttgctatattgaacatgatattcgcaattggagctaaacatggccacctcatcgccgcaccatggcgtgggaccgagaaggaccatttaatatacctaactagagccaggatacttagtatgaacggtgatgtcctgttcagccatcccgatctccaacaagtccaagtggagggcttgattgcattctaccttctcgcttctgatcaaatcaaccggtgggttaagaacttcctctcattaactaaattgagtccaccataacacttaatagggcgtggagaatctcggccttggcagtgcggtctgcaatcacacttggaatcaacatgaaaagcagcagtccagccacacctgatctttcgaaagaagcccgttaccgagtctggtggtgtctgtacacatttgagcacctactcgggataatgaccggtcgctcaacttgtatccgggacggagtgtgcacctcgccattcccgattccatttgaagaagaacagctgcaaatgcccgaagccgtcgaagtactcacagatgcggcactacgagacgaacggatcaacaacgtcatggcaagttcgcgtatcagacaaatgccgctccacccggtaaatggtaaagatgctagtcaccacactcgagcaaaaaacactgaatgggtcaaaaacctacctatcaactacgggctctgtcatctctactattgcgacttgacagtcgtcgtgcaagaaatcgtcaataaagtctattcagtagactgcgtcatggtgccatgggcccagatcgagcaacggattagtgaactcaagtcccgaaccgacatctggaaatccagccttccaaccgggcttgactttacacgcaaggatgataacgggccagatatccttcgctgcaaaatcagcttagcgttgcattactacagtgcgcgaatcacactaggtcgtccctgtctttgccggcgcgacgcgcgccgaaggggcgcgcacccctccttcagtcacgaaatggcagtgataaccctacactctgcacggcacatgctggatctagttccagatgagccagatgccatccagctataccgcatcgctccctggtggtgcatcctccactacctcatgcaagcaacgaccgtcctcctcctcgagctctccttcggcactgtccacatgcccgaagaagaaaacaacttcgtcgccctgtccaagaaggcgatccgttggctcttcgccatgtccgagcagagcattgcctcccgccgcgcctggcaactctgcgacctcagcctccgcaaactagcccagggcatgaagtacgacgtcagtgacatgccttcctacccatacaccccagagcctaaaagcactatcagcccggagccgctagctggccagtctgtatctcaagctgatggcgactactggggcccacaactagaacatctccccgtgtctgttccggagggaccgcctcgcgaagaccacgacacctcgaccgcagagctgatgacttcgttgacggccgatgcccaggactcgtacttcccctatgatcctatctccggggagtttatgcgctctttctttcctaattctaattctaatgagaatgagaatgataattgggaactttgaatattgcatattgcatacaattgtcgcccatactcacttcacgattgttttgtgtatgaaaaagaaaaaaagctacagaataacatgtaagaacatgagaagagtatgcgagctcgcatctctctcttttttccactgacttgcccacttattatataccccaatccatcgccctatatccaacacgtccctatcctcagcagtatacttaggaactatttttaacatattaacatccctatccctatacctatcctacttatttcttgtttcttccttaccgatattcatcacttcttgcataaggaactgcttgctctctattaggaattagtgcagtgaagcacagaagagagcggcagttcttcacgattgaaacatttccgtatgtgatacccatctctttttttctccatttcataagcctttctccctttatctaccgcgaatatctttctgcattacagatattttcacaatgggttggcaaaagtgatatctcatgattgatattgattggggctgtgcccactctagagctggacttagaacgggggcttgaaagggttgagattgccatcagactagaacttttgatactaaattcattcacattcatttgtcagcttattcattaatgcaatcagcacatcgtagagtaaatatccaatccgaagaaccgtcctggctcaatgacacagccttctcaagaagtccaagtgagaaaaaaaaaatagtatatacattcgagaatagtttttactttgaagataaaaatacatatagctaggacccataagcaaagaatcagcctagatattggggttatcataaggccacttcggctccggctcctccgccggcggcaaagactccgccaattccttcggccagtgagatctcatgaacggatcggatcggttgtacttgatccgcatcctgacgggcctgcgcgtgggggaagaaaagacctttcggagctgcatgcggcgcatgtggccggggatctcgatgtcgacttggtcttctgggagaccgaatttcaggaaggtctcgagacagaagtctaggatggactcgagctcggtttggggcatcttgccggactttaattgataggggtattccttgcgggagatggagggtgtatatgaagcggcgcggtcgtagatgaaggaggaggaagtggtgttattcgggtcggtcttggtcttggatttactgggacggccgtggggttgttcgtcagtggcttgtttcacgcactctgcatattctcggacggcacttcgtgcgagaatgcggacagtgttgaggtctgctatcgtggctttgcttcggacatggttgacgtaatctgcgtcccagcctggggaaccgtgtgcattggcccgttcatcactgaacagcagccgggcaacaccacctggagattggagctggcgcttgggagatacccagtcgacacagactttatcccagagctgcttgccgacgatagcgccctgcgtttcgacgacggcagcgaagatctcgtggaaggtggctgggggaatcaaagtggccttgtggtgtccggtgatttccttgggtggctccacttgtttgaggatgtccgggagaggacctgggatgagggagagcacgcggtgcatacgagagagtgttcgaagctggaagttcctgactttctcacgagtagtattagcatgccactcgccgcggaaaatgcggagcaaaatgtccgtggcctgattcaggtcttctgtgtctgccggagtcaaggtgccggcggatgtcctatgtttaacggtggcatcgagccgaattattgcacttgccagtacgccaatattgacgtaaccccaagatttagctcggtgctcggtcaagaagttgagcatcagcaccacgcgcttccaatcttttcgtgtgatactgaaattgatcaacgatttgatggtgttcacagaaagagggatcgcgagtgacgcgatgacgcgctcgccaagctcgacgttagcagtggcagctgcaaatcgaagaatagatggcgccagggcctggttcccatatgcgcgttgagggatagcagggccatcgatgtcattttccaggagtagttgctggccaaaatcaaacgcgtgggttgtagtcgccacgtcaaggagattggcaaaagtggggcatgacaactgcggaatagacgattgagagatatcatgaggttcaaaagacttgaaatcaaacaacagagaggcttcttcgtcgctggcttggctcacccgttcaaaaaacctttggatgtgctgtgccttgcttgcatcggaaatattttgaagccaagcatactcgtggaaaaggcgtccgctttgcttgtcccgagcgtaataattgagattgaactcgattaggccagtcatagcggccgattcatcataaaactgcgcccgcgttttcccatccaacacttgtgccaagctcaactcgttcccttcccacggaggaacaacattgttctgggaccttaggagatcctcgaaggcaacaggatcagaggacggttttaaacagcccgaggccaatatccgtacaatgtgccaattggtgaacctgttcgttggccgaagctcctcacgggtggacaaggcaggatcaataagtttagtcagaggggctgataaatttgtgagatcctcaggaagatatccacgatctcccattccgacataggccttgttcgccaagccgctccgcagtgatgcaaccacctcagagctgatagttcggaatccaagtccattgaatggttctttgtcctggcccttgagtattgggggtttctcattttggcctggccgacgccatgattgctcgatactgacattggttttttgtactgtagcaaggtcatttataagaggcgcccaactctcagccttccattcgataagccgggtcatttgatgtacgagtagtgtgcccgttctgcaaaaaccatgctccacacaacaccatagaatgagctcaagccaaatctcaggacctagctctcgaattcccggtgtgtaaggaacgaaaggtgacagcttccctgcatcagcggctgcagcagccactgcgacttcatgttcatgccacgccgcgtcagacaaaacgctcattatgggaccggacaaaaaatggagccctggtgggcggaacacaatctggctggcatctggcttcggatattgataaactctatcggagatcatgcctgcatggtgtaaacgggcaagagttcggtatacgcaggacattgcatgctttgaatcatctgaccgactgcgtgtagcatacaaaaccaaagagccgaggtttgcgagtacttcagccagaattctctccccaaagaatctcggtgcaggttccaccgttagcgtatcaagagaaatgttgtctgacggaaggggttcgagacgagaccatttccaaggggatgatgattttgtgcctcccgtgagcttgctgagagagaccttcgaggtaatgggagacaccaagtcggatgttgactcatctctgcggcgcacacgatatggtctattccaatcaagcccagccgaagggtgcttaggaggcatatgagcagctaacaactcataggtgtctatcaggctatttaaaagagcctgcacattagaccactcatggtgtgcaaatcccagatgcgcgatgagttgaaattcaaaatgaatccttccatcccatagacaccccagtagagcatgggtccgatcaagctcatgttcggattcgcggagtggtcgaagccgcctaggctggccagcaggttgggcgacgtctggtggtttggtagtttttggtggaatacaatccctcagcactggcatccattcctcgatgtgtctcttctggtcatgccggaggtgagggtgtttgattaaattgtatcgacgtagaaaaagaacttcatctgggaaattaatctccctttggtcattgcgagttttgcgggtgtattgtgtccaagtcggtcgggagaaaggagacacggatcgatatgggataaacggtaggcgtgaagcagttggcctgcgaccgaatggcaggatgcggccggggcgcaagcacctgctcatggtaccgcaacgaggcttaaaggcgggtgtataggtttcgcgatctcgatgggtacgggattggcgtgatacatgtcgatttcacaggtacatagcggtatattcacgagattcaattgaaccccataccaacaggggcaaatgacgaccagagatgggaggtgaggtaaatgttgtttcgagaattttggagatcaggaactgctgagtcatcaccgagctatgaaccaatcggaggccacagaatgcggagtttttgacaatataagaccctacattggaactataagggaattctctcctagaatattcagatctggattagatgatatgtagaatcagtatattttctgctaagtgagctctgattcacgcgatatccgatgcctgagcaccgagggcgcgactgctacgaatacggctatctaaagaacgccattactatcaacatctacccacattgttactggtcgagagcctttatccactccaaagttcttcccgaagcttagaatttaggatttccacggcatattggcatgaaaaatatctctcaaattcgatattgtttgtgctgtttgtgcatgccctaaagtacaatgaaatgttgccatggagcttcgatctaggtttccgggcccgttccaatcacatgcatacaagaccatccgctaaggctagcttctacttttctacttttgtgatggttatgttatttgctcacaactttaccgttttactacttactctacatagcactcgggaaaagactccaagatagcaacaatatcttctctatgctgatccagcagcgacgagaaacacggtaatgatctatctcacatgccatgcgagcgaaactgcaaagcacgaaatctagtacaacatctgacgggcatgatgacgagcaaagtctccctgctcaccagcaggaagggcagtcacggtcgcgataggcagagtggtgaaggaaccgctagaggactggctgcctgagaagccacccgggaatccaaggggggcaccggtagactcggggaatccagaaggctcgagcgcaggggtactggaaggagcgccggtgggcttggatccatgaccgtgtccttcgtggccaggtccgtgaccagctgctcggcgatcaaaggaaaatccagtaggccatccagtgggccatccagtcgggatgtcacttggagtgccagttggggttccggatggagttccgggtgggaaaccgccagggaagccaccaggaggagaaccggtaggagtagcagcggaggtcttgtcggcgtgctggcgagaatatgtcaataaagcacgagatctatgaggatctatagtgtagatactcacaggcaacttccaggctacgacagacggggccaagaatagggcggcaatgccaaaggtagcagtgaatttcatgataaagtgttgagttattggacaattcaaagtgaaagtggaaaatgaatggatgctaccggtagcaatgtaaagaaagacctgaattgagaagaatgaaggtgcacagcactgtagttgaaaagaaatcaccgagaacaggaaggtctagctggttatataccccttgcgtttcactgttgagagtcaaaatgatagattgagccgttaaaaggtcatcaaaagaccgccaaaagagtatgtgttccgcgagaggagtgggatctgcaggggaccaggtctcatcccgtggcgaaataattcaagcaggagtgatcttcatagatacaaaaataacgctatcacccggagtgtagcatattgtagtggaaccaggaactacggcacaaatagtggatggaacgcatattgtgcggagcaggttgtttcagacaaaaagaccccgataaaacgggcgaatgatagttctccaccttgttctgcacatcagctcctgtcgatcacttatgtgtctgatgaaggaggtgtgtcctgtttagatggagattggtggagccctaaaggcggcaagcccgcgaaggtctagaaacatacactacgcaacattaccagaaagaatctaacttgtgggatttcttttttcctgagcgtatattgtatgatcgctcatttacggagaattagtgctgtaataagtctgatgtgagcatgcccataaatcctcatgttatgctttattccttgtgtctagaacaagttatatagtttaggtcgtttttataggacactttatagagttaacagactagattgtggaggtacttagttatatacttatagtgccatgcactggtcaaagcttacatactacgcgaataatacctaactccatgtggtctagggcctacgcttcaagcttttgttgtaacttattcaatccgttgtggcagatgctctcaattctatgtaaaatttccgaaaagctgccctcgatttccaaatctggatgtctttacctttgaatgatcgactaaggcgttaaaccaaggcaaaaccaactcgaaaaagcactcacaggtccgccatttacaactagaatatgaggacatgtaaaaaagagaaatgtccaattctggcactagagacagccgtctttccaactcgtagttatctattctgccccgactagcactgttagtcatcctcctgtggccattaattatggaacctgaccgaccaaagccaaccatatcggtccaaaatccggtttcctctgtttcacctcgaaaatgctaccgtcaaggctaggtggatcaagcccttgacccctataagggaaatagcacagtccaacagtgtacatccgccacgagtcccaaatgacaagccccaggcggcgccagggcctgaagtgccttaagcccaatgaacctgtttgagagaccatcgcgtttatcatttggaagtactggacatgaatttgtctttgtgaacgccattcgggtgtaagctaccaccgtgttgatgttgttgcttcattatcggggggtataggcggcggagaccagatagacatggacttactagagggcagattgaaagagtcgaagaaaggaattggtgttttctcggggaattcccaggcagcgtgggaggactcgggtccctacgtgtccattatgaaccactgagatctcactcctcggcgtagtgccatagaagggagtaaggcctaggtctgaaagaaggacggcaatcgtccagatcagctcgttgtttcctctatgtatctcattccagacattgtatgcgtctaggtcctgtattgattgtgtatgccaattccagcttcccgttgcagatttgcgaagggccgaatagtgttggagatgaaagagagactagtacgtgcggtattcttcaatccatgagaagggattccgccctttttctgcgcgctcagctccgctcagagagccgactggtatttcactgagggtagaagcaaagttctgctgcataagcggtagacaagcacaggcaaggcgctgtattccggcagctaggtggatgatgccgattgatgccctgtaatccagatttagtgtgtactcggccatgtgtgagaataggtttccgaggacgggcttcaccgctggcaccgagagcgcgactagagttccagcgatctcggcgctctcgacgcacagcatcggactgtaggcccagctgccgtcggagtcccattgacctgcggctacgagccaaacgcggattgcggagatcacgataacgccgtgacctcatatgcttgttggctgtgggcaaaatctgtgtaatgcgagatatgaacaaggctgatgttgtagcatattctctgtatctccggaaaaccggtaatagggtttgccagtaagagggaatgtataatggagggttgagtccggaagagagcgtggacttgagaggatacggatgtgaggttttctatagcggcaaaatcggcgatatgaatgaggatttgttggttcagttctgcgggtagttaagcgaatgggtccatggtggatgaaatattagcagtgaagtgtgtgaaaatgagaaagacaaaattgggaggtagttccttaagtactactcacctaccctgtgttgtctccgccaagcccaggctaattctcaaccacgcactataaggcactgtagaacacttgatatcgtacttcattgtttgaagacattaaattaccagcgtaaaaggaccagcgatcatggacagaccagtcaacgcttgtttgtaactatacatctgttcacaccttcattcccgtcatgcgcccttataattgccaatataaaatagaagatgcttttcggcgaagccactcttgtttgtggtcttaaacacacgcacctaggttggaaccttcactcccagctcgggtttgtgctggataagcatatatgcgaccccaaccccgttggcagtccgcagaagtgccttgccttcatcactttccatgctgaaggtcgtgcctggccattctttagcgacactccccgcggcctcatcaatgatcctcaaggtatccggattctggacatttttccgaataaagtacttaagattcttgattttgttactccccgcggccaacttctgccattgaagaaaatagacgttcgatagcttgtatggcgagagcaaggggccggtgtcgacctcatgcatgacaacaagtagcatgctacacgtcagctgtgacgtgtcagccagcacaaccaccaccggggctaacgtctgccacctgatagactgggatgaggaccagggagacagcagcaagaacagacctagcgacaatcccgatccaaagccaacttccaccacttccaaaaccacctcaacatccccagccactacaatagccacaggcaaacccgtcccatcgggcctgtcttcatcccgcgacgacatccaacttgtcatcttcgattccaacaagataacaagcgacggctcaacatggcattgggccggatacctcctccccagccttggctacgacgacgaggacgtctgcaacgagaaatacgaagtcatctcagacccccacgtcgaagacaaccaagcttggcctttctccatgggcccctttaatgctccaggtttagattactgcttcttccacaaattcgcggaccccctctcccccaagtaacccgggctttatctcctgtaacaaccatgcctatctgacgtggtgcatagggcttgacgggaaacatgcggtgaggaagccggcgcatacatgtaccgggaatggcggaaagaagaccgagttctggcttcaggcttggtgcagtttgaaggggtagaaatagctagttgccgccattatgcagatggcctagtttcagctagggtaccggactttgcatacaaatacctagtaagtgggagaagtagaagaatggaaaatgagacgaagggaggacgagcggcgaagacggggtcttttatgttgaaagacatattacaaaaaagaaagaaagaaagaaagaaagtaacccataccaaaagaatatatgcaatgcgcgtcctaaactgatcccggggtattgtacatgaaaccaacacaatcaaattgaaagccaaatcgtcaaatcgtcaagtgacttcaaagctcctcctcaagaacttcttcttcgccaagctcttgttccacttcgtcgacgacaaagctctcgtagtcttcaagacctttttgaacatgtactttgaagcgaatcacgtcattaagcatcgtttcgacgttagtatgcaactcctctcggagggaatttgcccgaagcgtcagttgttcgtattcgatattggtgttcatctcgcgctgctccatcaattgaacactgtcgctgagcgtagcgcgcatctttgccaattccttctccattttctcaatttgggcatcggaggccagcttctgagtcgtcgtgatttcttttgttcgttcaaactcttcctctgctgcccggcgtcgatgctccaaagcctcgacctcgctccgtttctcatccattgcctctttaatgttgtcgagtagattgcgacggtcaaggtcatcatcgatcccttgcttccgtcgttcattgatctctttccggagggattgcaggctgtttcggacagagcctcgtagatccaaattgagcaaatgcgccgggtggtagccagtgaaaggctccgccaataagcgatccccctcgggagagattgggttggcagggccaccaatttggctcgcagagaaattgctctcattaatattcagggtaagctcataatcttggcccttggcgttctcagcagctgcgggaatcaagctagtctggtagccaagagtattataagccttcacgatctgttccagatcttccagtttctggctagcttccgcctccttctccatgacacggacatgggcctcttcaaggcgagctacggtatcttcgagattcttctgtagacgttctcgctccgagttcatgcggtcgatatcctgaatagtgatgccttggcgatcaacacttgcctgtagttcggaacgctcagattcagtggcctggagatcggtatcagttttctcgatctccgtgtcgaggaatttgatgcgagtctcgtatttttcgattttgcctttgacgttttgattataatcctcaaatttcctcttgtcatcctccaagatacggaagtgtttatccaacttggcaatgtcgggagcactcttctccacttcttcaatttgatcacgaagagcccggttctccgcctctagtgcctccagttcctgcacgtaccgttcgttgccaagagcaaattctcgcgacatgttttcaacgtgcgggattaaccgcttctcggcggtgtcatcatcctcgtcttcaccaccctgtagccaatcgtgatatgcttgagtgaggaaccggaaaataatgcgatcaccggtgacatcgacacccgcctcggcgcaggcatcatcatactcgcctgactgatagcgatccatcatctgtgccaattgcatcaaccaatgtagcattccgaggaaggtcgaccagttctggccaccaacggctgcgatttgtgacttcgtaatgcctttctcatatgggtatcttagctgttttaggattggcggtacttcggagtccatcgctttctgaaacttgtatcctggatcgatccgatgatatagccactggaagataaggttgaaatccttctgggtcggtgagcgaagagtgttctggcccaaggaatgtttcatttccaactcaaagccatgaatagtcaaatactccaacaattcctggccaatccgtgcctggaaagatcggtctctgagagggcgcgggtctctgggaaccccagccacgttgggaacttgagtgaagaacgattgatgtcccatcggccctcctcccgtggatggtcgcgaaaacacactacttctgcgctgtgggttttgaggcggtgcaggaatggaggaaagagaccctggcgcgtagctctgccgactggcactggctccattgaacatgttactcgacactgatcggcgaacagatgagagaccggcatcagcgccatatggtccaccaattgacatgcgtgtaaaatttggctgctgtgggcgactagtggagcccatcaatgaacttcggtggttctgagagctgaacggggggttttggaatccgatagagcttgcgcgcttcagtgccgattgcggttgagggatggcggagaaattttgaacactcccgagagtcttgatcgcaatataaattagcctcaagtcttgcgctagataggggggatctatacctctcgggggcgcttaatactgaaaagcccagtatcttgcgacatggtgataaacaagccgcgaaggcggcaataaacaaggcgattcttttgacaagtgttttttttttggattttgttgaatattgacaaatatccaacgtccaagtggattcaccacaaaatccaagaggaggggtttaatctgttgtttggcaggcacgaggcgggatttgggccggcgatgtaaacaaatgcatgccgcttctaaatgaagtaggcggtgtgtggacacaggaaaaacagtttagccgatgatcacgagactcccgtctggggaagtcttggcgttggcgcgagttccgaggtccaaatggcgattgccgatgtgagcgtcgcatctctccctaattcatcatttctgcacttgactggcagtctatatcattcataatggctccacgcgaggagctgattgcctcagctgtaagttgtctagtgacacaatgtctattaccatcgttcggggccacagctaactcatgcgtccgctagattacctgtatgggctacgaggcacacaacttgatgtgtaatgatagctgactttatctagtcctccaggatccgtccgttgcatcctcgcccattgaaaaaagagtctcatttctccaatctaagaacttgactcaagaggaagtgaacatcgccttatcgcgagtgggcgaagacccgtctgccgtggctgcagctacagcttcggcatcgtccccggcgcctagctactcttcacagccagttccttaccggcaaccacagcctccccaaggatatggctatcctccatataatcaatggcagccgcctcctgagtacgtttgactatcgattgtcgcatggtgttcgagactaatcacatgaaaaggccacccaagagagattggcgtgactggtttattatggcaacagtggtgggtggggttggttacgggttgtatactgtcacaaaggtatccagtggtcccctctcttaaattaatggcgctgatcaatctatccagcgatatatcgcacccttgatcgccccaccgactcctccgcagttggaacaagataaagaaaacattgacgagcagttctcacgtgcatttactctgatcgaacaattatccaccgacactgctgcattgaagaccgccgaggaagcccgtaccgagcgcttggatagggctctcaaggacgtagagagtctcgttgctgatctgaagaactcatctcgccgaagagatgatgagactcgtcgcattagtgacgaggtgaagtcattgaaggatgccattcccaaggcccttgagggtgcccgggaaggcaatgagaaccgactgaaggagctcggaaccgagctcaaaagcttgaagacccttctgggcaaccgacttggtggtggcggagctactcctgttgctggcaggacccttggatctactccattccctagcactcgcccggcaccggaagagacccccgccacttccactcctgctgccaccaacggtttggctgctactgtgactccagccgaacaggagccaactcaggcagctgccccagcaagcacaatccagagccccaaccccctctcgcagcttggtcggtctgccgcctccatcccggcatggcaaatggctgcggccaaccggtctaaggccacttcgcactcgagtgcacctgccacacctgctgaaaacaccgctagcccgagcctggagcagagcgctcctactagttaaagttgaactgggtttgctaaattattgaatgctgtatacctctcgacctagtgtatttatcacaatgaagggtttcccttgcatgagaaggtcgctccgtagtatagcattttctattccaatatgaatttgtagtcgaaatcaacgagattgggatgaagaaccttggaatgcgctagaatcgaaaacccggggactggccgaaccgataaggcgaccgtcttatcaccccagacgataatctcctccaaactttccagaaactctcaacttcagaagaaacagccaaaatgccttcgccaactcgctcatcgcaccgagctacctctccttctgcaccaagctcaagccgccatcaccgcagccgccacagccattcccaccgccatcggcatcgcgagagctcgcgctcgcgctctccgcaccgatcagacagacaccgatcagaccgtcaccaccgccatagcgaagacaaagaccgcaggcaccatgagcgacgacacagagacgctccagcgaaaccagtcgtgcttccttaccaagcgcgtgcgctatcagggcgcgacctgaaggtttatgaacccatgtttggcatgtacttggatatccaaaaaggaaaatatatcgaagacttgagtgaagatgaagtgaaagggcggtggaagagttttacgcaaaaatggtaggccgaaggtattctttgcttggcgcgatgattactgacatcgcaggaatcgtggagagctcgcagaaggatggtatgatcccgttacactagacaaagcacgtcagcatgcagaggaggaaccgacagctggcccaagaggcggacgcgaatcgcccgattatacgcagggccagcgagcgactggtgaaaccctacaggatccgccaataggcgatgacgatgatgaggaggatggggatgacgagtacgggcctagtctgccaaaagctggctcagggagaggtggcccccgagcgggccctgcaatcccaactatgcaagatctcgagctcaaaagaggtacgcttttctacttcccctaaatatggccagtgtgctgacctccaaccagaatctgctattgagaatgccatcgctgcccgcggagagtcacgcgatcaataccgtgctgaaatccgtacacataaatctacgatgcgccagatcgaagatgaaattgcaccgcgggctgagccaggcacacgggagagacagctcgagaagcgacgagaacttgcttcgagtaatcgtgcattcgcggacgcgcgtggtggttcgcccgaaggagctcctgatgaagacttaatgggcgcaggcaatgatttctctgccttgaaaaaggagaaggagaaagaccaacgtaaaaagaacgatcgtgagatccggagagaggagatccttcgtgcgcgtacagcggagcgagaagagcgtgcccaggcgtatcgacaaaaggagcaagagacgatgggcttcttgcaagctctggcaaagcagcgatttggttgaagataagaaatgtcgtgtgcacatgcgcctttgatcttaatatcctatagtcttcactcttaggtccataaagcaataataaatacgatttgcatgccatactctctcagtcgtccgctccagcggaacggtccgacaccgccgtcggagtgactccgaggtatctaggccatatatgatcttccctggataatacccagactactataaacccagcatgttcaaacaactatatcgcctaccatgccggtcaacattgacaccattagcacccggtagccggcggtatttccagaccaaaaggcaaaactccctaccagccgcatactaccgcggcggcacctcacgcgcagtcttcttcaagcaagaagacctacccccgaacaaggaagactgggctcccatattccgcagtgtcatcggtagtccagatcccaatggccgacagctagacggattggggggtggaatatccagcctctcaaaggtatgcgtagtcggtgcatcgacacacgacgaagccgatgtcgattacaccttcgtctcactcggtatcaaaaacaccgacgtcgactactccagtaattgcgggaacatgagttccgccgtcggccccttcgcagtcgatgcacatctgttcccattacaaaatcccagcccggattcagcctcggtacgcatccacaacaccaacaccggcaagatcattcattcgtccttccccgttgtcgacggcgaggctactgcgagcggtgattttgctatagacggtgtcgctggtacagctgcccgcatcaagctcgacttcatcgaccccgccggctcggtcacggggaaactcctgcctaccggaaacgtcgtcgatacctttgacgctaccaaagctacgtgcatcgacgtcgggaatccgtgtgtcttcgtgcaggcgctcgatctcggcgtgagtgggaatttgactcctgatgagatcactgctcatccggatttgttgccgcgcttggactccattcgtcggcaggcgggcgttaagatgggtattgcggatgagactgcggcagttcctggtagtattcctaagatctgtatcgtggctgctccttctactaccgattctagagatatcgagcggaggcagacgtctgttgatgttgatcttctggctcgtgcgctttctgttggacagccgcataaggcggtcccgattactgtcgcgttggctcttgctgctgctgttcatgtgccgcagagtacagtggctggcgttgtgagtgaggatcctgtcgatagcgctgggcttactattggtcatgccagtgggaatctgttggttggtgccaacttcgatgcagatggcgcgttaacttctgccacggtctttcgtacagcacgtcgtttgttcgagggacgtatttactggaagaacgataactgagcgggtgaatgatgttcgattgtacaatataattggcaggaagagtacatgcacacatgtatagccggctgaaacaactgaaaagaaagacctgatcatatgagatatgcaaataaaaacttttattcttgtgcttcacaagtggtatatctatatcatgatctatccccagctttaagcatgtctgccgagatcaatatcagcaaccagcttcatatcatcagtaccagccccgtcacccagcccaaagaacggcttgacagcaacatcaaccacctcctcaaacaaacgcccaataacagcctccttcagatcctcaccagtctgcgcgaaatccgggtacgcgttgagctccagcagccacacattcccaagagcgtcaacgaggaaatcaacaccaaacagctcaaacgcattgggcagagtctggaaatgaaccatcataccgcgggccgcagcctcaaacacctcaccggtcaccgagcagatctgatcaaagatcttctccttccagtctgcactgaaaccggggacgtggtggtcgagatcccagaagcggcgcacactatccttgttcgagctgccgccttcctggaaacaggtgttggtcagatggcgcgcgaggtcggcgacgtcgtactcttcatgcggagcgcagtagcccttcgcagcgaagagcgcgagcatctccttgaagacgtagactttgagtgatcccgaggcgaggacataggtgcggatgtggaatttacggtttgaggatgacgggaggaggagaggtgggtcaatatagggctgtacgaggaagtggcggagctgcgaagtgacgatccctgtgtctagggcggcgctgccgtcattcgcgtcgtcgccatttctctcggatccgctctcgtcgtctgagtcttcttcccactcctcgaagatctcgcgtagctggtcttcgctgttgaagatgcggattccctggcctcgatcgctcatgccgggcttgaggatccaccattccttttcggagtcaggtcgatcttcgttcttagctaagctgtcgttcaactcgaatgcttctagcagggcgtcgtcgaggaattcggcataatcgagttcgaagtcgaaggcgggcttgaagtggtgtcgaagagcgctctctgggtgtttcgagatccaattggccactgtgtttgagagatagtgcttgcgaattaaagctttccggatgatgtacgcgcttgaaagagacgtcgagggcctggacatgatatgctcgaaatcgaggcgctcatattcccggtactggaaaaatggcgcagatgagtccggcagctcggacacagaagacacacgcttgaaggcacttcccaggcgacatgttaatgcccgttcaaccatttcttgcacgtaggagttatcgcagtcgacgagggagtacaacgagggcggattagccgatctacaagatctccgtctatcagaaagggtgccaatacttaaagaaaatcaaatcaaaggggaggggatatagtatctaacagctaagccagatatctaaggtgggtgcaacatatagatttcggatagaaccctccataccatgcatggcgtcaaagtcgtcactcacagcttaatctcccccgaaataccgggcgcgggcatgaaattggccctgaggggcgtgacgctgtaaaagtcagtcgatgtccaaaagtaagagggcattgaacaaacctagtcatttgctccttaacagtccagccatcattgccaggctcactttcctccacacttcggtaaacatcctggaaactcggtgcccacttgaaatgcttgtgctgaattccggatggcttctggctgttaccgacaatctgatctggttgctttcctgccatttcgccttcgttgcgtagttgctcttcttgcaaatcagggtcgtctgcgggtgtggggtcgacagcctggaagcaactcccggatgtccacgtgttctgcagcatgtcggtatataagaccttgttcttactaacaccgggttcgaggggaacattgacgctatagaggtgcaccccatctgcccagttcgcgcaaagatgctcaatcaacttgactgaatggcccgcggcctctgcgatgataacagggtcatggtttcgagagctgaaagcatacgacagagcaattgagcgcttgccacagcaggcaccttccaacgctgcgccaatggttccgctcgacaatgcgaataatgccgttgtgttgcgaccatagttcggaccggagacaatcacatcgacagggccatgttctttaaagtagtggtataggccgatctggacacagctcgcgggagttgagtcgatcaaaatccactcttcgccttcgtcgtgttcaccatcactgccacggggcaggttgtgtgttgtcccgtcttcttgatggagcgtgccgggccggaagtaggtaggtttgacagaggcgcctaccatgtgcgctttacctatccatgatcgttgctggtgtggtagaatgaccgagaccgtatgacctgcggactggagcgagcggacaagcgaatgcacgtacggcgatgactggtttgacggaggaccgtcgtcgttggtgacctagatagagataagtcttcaagctgacattgcagtatctatatctgcttaccaggatatgcatttggggtgaagtggttgagatgtgaaggatggaggggaagaaagttcccccccgctttgcgttgtcgcaatcggcccagatgatccacaatgtcattcccactatcataagacattacaacatatagtaccattcagctcagctaggccaatgaaaacacatcattgtgattgtgtcaaatgactgcgccgtctctgtactccacgagcttctgcgctttctagtccagagcctgtaccagcttcatcaacatcagccggatagcttgagagcaacctcctctcctgctcgggctcttcctttttgacatcggaagattcatcagaagtattcccgtcctcggactcttctttgatagagtcctgcggctcctccttgatctcattcttaggcatagtcccccaaatccaagtcatggccagccacgtcaagccagcagagacaatagagaccgaccagaacaaagagctgaaaacaacaaaagacgtaatcttccaataatacataatccatctatcatctgttagccatatcccacaaaccacctaatccccaagaagacctacctaagccctgtaagcctagcacggaactccacccgggcagtgtaaatctgcatgtccgagtaactttggatctccagcctcagactctgcggcaagttctgcgcccccttcgcaaactcaagctgctccatcatcggcacctccagtgtctccgactcccggcgccagccaacaacatagagcggcatacgcgccactctccgggcaacatctaccagcggcgaagcataagtcatgatagcagggcggcgggcctgcgagatcggggcgctattcgggccgagtaagagggatgaggcggggcgggatgagaagagggtgaggtcgagcatgaagttgcctgtatcgaggtttgagggtgtgcgtgggagctcgagcgtcacggatacgtcgtagggctgaagagccacaaattccgagtcaaaggttgctgtaccccaggggttgccatcgcttgcacaagttagttgagctgggtgtctttgtggggaatgttgttatacccaaattgtagatggacttcgcgttgtagtccgaccgtgggaataaatttaaaataaaaaaccccgtaggcaattgcggagatgcctattaggaatgatgcggcgcccatgaacaacagcgtgttcaggtatagccgtaaggcggacttggataccagcgcgcggaacggcgcgaggatcgcctcctgtcttgtgtcagttgcagctgagaaatatgcatcaatacacccaccatgatgatttccctgacagaagatgggccatattcggactcgtctccaaattctgagtccgccattgtaggagtagttggcagaaacaacattccgaaattggaagttgaggtcatcctgttatctccgttatctacaccgaggtctgcgtccaagcttcatatatgcctacgataatatttaccaactcctagccctttatttagtaattgtccagtgatggcatgtctgacagagctaaacatccactggttaccgcagatttacagtagagaagttctatttcttcattgtgctgtcaataaagttgtatacctacatttgtatataaacgagaccttcggggctcatgtagggatacctagattaagtctagagcggagtgctagtttgacgataagcgacaaaagaagatgtggttcattatactagaaaacgccatacggaaggcccaaaaagaagctacaatgatcataagaatagtaaattagcatcgccccatgcagataatgaagacaccgccaactccagcttttacagtcttatcattacaggtcgcgggcagcatgagacgcgaaaaatatcatggaacctcaagtcatgcgaaaatcgtaagagaaaaataaatatgcatgccatcaccacggctaacccctgccgtaacatgaaactgaaaggatagaatggcaaaaaacgcaaaagagcaattgcggaagagaacccgtgaaaattacatgcaacaaagtactcctgtgccgcccgagttatcagaaagaacttgaggagagacatgaatggagaggatgaggaggagaagccaggaggggcttaggcgatgggccgagggctctgttgttggatatgttggagaagagcgtcgaaaagacgaccgatctagagagttatttagtatcgcgacactgtggaagattggtggtaagcttacctcaggtgccgcctgaatgaaggggaggcggaagaatgagtagctccggttctggaggagctcctgcagggtgatgatcagaccccatggatgcgggcggtgcacaatcagtcgctccaacaatacgcgaatgatttgttggcggatatccgagtcatcttgctcagagtaatccacaccaaacagacggagaatagtgaagctgaagaagtaggtgtggctgttggggtagcggagctggttggccattgcactgagtaagtagtagcgactttcaggacgcagaacttgggcgatcttctccagaagagcagcgtgagtcgagttctcaaaggcgctgcgggtattgcccttggaggcatgctccactgcagcttgttggccaatatacaaaacaagcgcgttgactaggacgacatccacgtcgacggggacaaagaggaggccagtttccttgaattcggggttaagaatggcgtcacagagctgctgaacagcagaatcggagatgttgtcattctggagtacatcatcaacaacgtccttgatgttggcaagctgcaaaggagcaacgatatcaccggcgatcttgggaatttcccgcatctcctcgatacgctcgaccttcaatccttcgcggaaaggatcgggaagtttctggaacgacgaggggtaggcactgagaacaagattgcggagctgagcgcaatgagccgggatcacattgcagaactggaaatggttctcagccacgaactcggggaaatcgtggtgcagaatcagcaagatacggagaacgcccttgtataggtccttggcaacgtaggtaatgttggcagcctttaattgctcgcccatgtaggatagcaatgcttggatgatctcgcagtaaggcgcccatcctgcacgatcaggcatgttgagcatgtcagacatgaacacgcggtgagagactaagcaaagccagccataaacgaacccgggcacgtaacggggctggaaggagaggaatttgttggccaaggcgaagatcattccctggtgctgctcagtgtgctggaggccgttcatagagtactcgcacagaatactcgagaagagacggaagaatacacgctggttgaaagcttctcctctcatgacctggtggtgattgaggaccagaaccaagagagacagaatagagttgaagtacgtagccttactagctttgacggcgccagcggtctcgccctggaatctgacgagaagaatcacgagcttagcgagggcatcgatgtaaaggaaggcctcatcaaggctgccgccgttggggttctgagactcatgctcaaacatggcgacggaaatgtcgatgctgagacggaaaaatagtgctgagtcctcctggctgttcatcacttggcggttgtggaggtcctgtaggaaagagtggaaggtgcggtcagtggcaccgggggccttgtaaataccgatccactcgctgaagatgtactccatttggtctcgcttggacctggcttggtctgtaaggagagagttgatgacctcgggaataccggactcgcgcagctttcgcacgatttcgagaccgggagcaacgcttccatcctcagcaagccattggctcatagcatctagactgccggagaagtctgatcgaagtgccgatggttcttcgttgaaaagaacgcgatccatcaggttgcccagcaactccaaagcaggaacattcctagatagaatgagtcgggtcaggttcgtatcgacccgacggatgtctaggaggcctgcgtcgatgagagcaacggtgaccggcacattgaacatgtgctcatcatcaacttcggaaagcagtgcccacgtgtaccgggcaatgagactggacatatcgcatagcttggcaagcaggtgcacaaggacctcaatctcgagggatccatgtggctgggaatacaaaagggtgcaaaccttcaaagaggttagtcgcgccaactcctctccattcgtcgaggcaaggatgctgcgcagtgcctggttgtattcttgaagaactgcactatctctgccaagatccttgacgtgttcttcaggggcgctgcgagcagactgctggagatcggagacgaggctttccactctttcccgggggctttgagcatcaaggaacccattagtctggactgggggcatttgagaaacagcaggctgtgtctggggagttctgtgaggaatggctggctgctcagccggggtagaaaggtttggaatagcaggataggattccccaagcacgtcggggagctgacggccggccgatgcatcagtggatggcgccgggcctcgggattgacgggcaaactcttcgtagatggcgagttgctccttgttgagacccccaggcgtttgccggtaaggctccggaatgaacaatccccaacggttcattgaaggatcaatgaaaggatcgttagaacgactggccagatggcgacgacgagcctccaattgaggctcaatcaccttctcgatctcgggcagggacttttcctctgcagctttctcgacaatgccacaggcagcatccaggttatcgttgacacacatcagaatcaagccttcgggcataggctgctcggagtactcttgctgaatcatgcggatatagttagtcatgctaaccttcagaggctctttgcaggtgacgagtgccaggctaccagcaagttgtcggaccatgatgcccgcggcgtggcgcacgcgttcctcatcgggttccatggcaaagtccttggagacaagttgtacggtggagatggatgcgatggtcacagaacgctcgactacgggggtaatgatctcggcaatggcgcgctcgactgcagtatgcacaatctgtttaagaattgtaggatcgaccatgctgctcgccgatgagggcaggacaaggatcttgtcaagacttggcagtgttgacatgatggcggcgggggacaatctctcattccggatggctgggttaatagcgctgagtgacaagtcttcaaatggctcaagaccttccggagcgttaacagttgacagttgttcctcggcatgtgcagcacgatcgcgaatgacgattgccggctcaattgtcttatggtcgagatcaagatctttacagagaacttcgatttcaaacttgagattgagctttagttcggcgaaatgataaagctccaacagcaggcccaaaatatccatcagccaggggttgggtggtttgaagactgtggatttggtagcctgcacaagaactttgcaggtgaaggggattgtaaccatgaggcgttgagtgtcgtatccttcgaggagcaagcccttgaagtagatgttcttatgcttaataggtttgtctttggcaatagtcagtgagccaagccaagcaccaaggttcttcaggtggccgcgatcggtagacgaggttaaggtgccttctgagttaatcaacttagcgacactaacataggtctcccgtaagacctcagcccagaggatcttgtcaccaatgcgcccaagaagatcaagatagagctgctggaaattaggctgcaacttggcacgttcttccaccaggtatgcggcgaaccactggtggtgctggtcacgcaacacttctcgtagatcttcaagtttctcgtcaatgttctgctcggaaacattgttaagaacgaaaagaatcttgtcttgaatgtcttcatccggttcttcgtagagctcagatcgaagaggtgggtcgagttgaacagcacggaacttgcgcacggagccatcagcgatgggggagtcaacagaattgccattggtcaaaggcacagaagcaagaccatcgaatggtcctgcctccgcttcgccaatctggtttccctgttcacggagcacctcctctgccttttggtatatgggtgtgccttggagagaggggatttggaagagcaggtggcagaaaccagcccactcgggaagacggttaatcaactgttcaatcgcttccacgccgaacttgtacatcgggtcatgaggctcatgctcgcggacagcctcgaggatcataccgagaccgaccttcagcgtgatgccatcaacaagacggaagttgattatgccaccgaacatgaccgcagtcttcgtgagagcctcgagcgggtattcatggtagcaatggtattcgtcaaccaggccgtgcaccatgcaggcgaacagatcttgttctgtggggtcgcgcgaagacttgtatttgcgcatcaactccagcatctcacgcagcgagagttcctcgtggtacattttaccaaagagctcttgcatttgcttgtcaattgactcaggcaacgtgttaccgttctcgccattggcgtcgattatatcatcgaatccttcgccgtagttgatcagacgaggatacgtctggatgcaaatgcgctggacaggggtgagattttcgcggtccccgacgtattcctccaatacagacaaaagcgtataaacagttttgactgcgaggctgaccatttgatgagcagactgctccttccgttggacgtgcaattcgtcctcggccttgattcgcaggaacttagagagcagaccacccatatcaatagcgcctttctgtgcggcattccgaacccactgctcaagatcaaagggactcttgcggtgggagtagcaggcgagatcgagggcaagaccgttagtgaacccaaggagataatcgagccatccgtatgctgcagcgtgctcatagatcacagcggtggaggtgggatcctgagtgaatgtggtgaaaagttgttctgatacccactgtcgttcttgtctccaagcaccttggagagcgagctggtacccatcctcttgcttcgagatgaagacaatgaatgtgcgcaagacaaagctctgctggacactggtccacggctgcggaatagccagagcagaaacgaggaaaaccggcaaatcaaactgaacgaccgcctttataaggagctggctttctgtcgcagcccacgaagcctgggagaacaaggcaaggtcgaaaattgccttcatagcgtccatggaccgaagaggtgactttgccgcacgctcgccttgcaatttgacgatttcaggggcatcttcaaagaagtcagtggggaaagttgcgcgaagattagggatgtgcgatgggtcgatccgagaggccacaaaagctgttaggaatgacatctgcgtgtcacgatgctcccagtctccaccccaaagcttttgaacatccaaagaggagtcgtcgaccgacatggcggaaagaacattgtacaacttggtgaattgtttcggatccactctgaggccctcacgatcgaagtggcggaacacgaggggccagtttattggcttgtcgttatatgcacttaagaatgtctctagtgagaattgttcccaatattgcgacaagatcatgaagagaagggcgctggctagatgttcttcgctccaattcctctggtctgaatttagcaattcacttattgtctcggtatgcgcagtggcacgagctcccttggcatgaagctgtcgtacaaggacatattgagggttcacaaaattgaacatctgtaaagcagaggaaacttcgaatggcatatccaagccaagtttttggaatcgcagattggctgcgtaaaccagcttcgccttgacatcgtcggtaaaattgcggggagggtataagataaaacgttcaatcgtcatgccaaggaaggagttgctgtaatccttagtcacttcggtaggactcgccaagctctgtaagaaaggggcaatggaattcgagaggatggcatcggctaatgaggatggttagatcgacccagaggcgtagataggagcaaacatacctttagcacgaagatctgacttgctagtcagtttgaaggccaatgcaagggaaaccttgacaactggatcgagtcggaaatgatctaggaaagtggaaaggtcgaagtcgcggaagatatctccttcggaagtatctactgtctcggcgattttctgagactgctccatgtccgaggacactttctgcatctcctggacaaggagagggtagttgcccgcattttcaacggatttgttaacaccggggaagatttgaggcgcatttcctgttaggaggcggcgaaagtatttggaaaagacctccattccgttcgaagtcacaagctgcggttattagaatcgactggattgggatatacggaaggaccaccaaccttgtgtatctgggcagcctttgtctcccacttctcttttccttccttctccgtaatagaatccagtaacaagaacacctgggcaatagatattttggtgagcgacgattggctcgagtgggcgtttgtagaacccggcttgtcagaagcaaaacctgtgggagaattcacggttgttccggacgagagcggcgaaaagacgcctcgggaagatcccggcccaccacctcctcccccagttcctcctccacccggggcggagcctgtagcagaggccaaatgggaccctatagaaggggtgtgagctcggaatttaggggacgaaagggttgttgcgtgctgttgcgagccagattgcaatgatgtgaagggcgaagacgtgtgtttgggacttccaccagagagacccctagcagagctcagcacggcggagaaagaagatggtgtcgaaaccccaaggcctgcgtccaagccccgggaagccgtggggggagcggcggaggatatgttggtcgcgagtggagtcaacccacgacgtgcgccggactgcgacacggaccgaccccaggcaccaatatcggtcctggtcgaagaagatttatcggtgccagaagcaatcgacgattgggcggaagggtgagggggagggaaggtcatctaggagacgcgatcatttgatctcgaggtccaaagacagatttttaagtcacaggcgcaataaacggggggaaatcgatagagcagatcaataaaatagacgcgagatcgtgcgatatcgagagagggagggtgtcgggaaagtaggataacactgtgggagaggaatggatgggggaacgatgagatggagaggttgcgagaggaatggggtgcaaggtgcgagttgtcggaagtgtgcctgcctcaggtgtcgagtgggagctcccaatcaggcaccaaagtgcgatacaaggtacgccttgcggtcgttcgagtgtggaagaattgctgaagctataacctgtttaagacttgatgaatgtgtggtttttgctccccttgctgttcattgcccatccttctcccacctacatgctggtgtttggagatggtcacgtgcaatgtcccctgcacgtgatgtatggctgagtcatctactctggggtccacctgccgctgcacgggtccgtgaatgtaccctaatgaagcaagacctagagcaggtgctatggagagtaatctgagcacagcccgaggatattcgagtatgtatgtatttacaatgtaggagcatgtaatatgtcttcaaagtgagcaaggggttttcaatgatttatgctatgtcatcctacacagcaagctaatttgtctatcctgcaatatgatggatatgatgatagaactgcttcgtcgttaatgctaagataggtaaaattcaacctagcatcttacgaatatagtaaatgagaacgatatatgatcaagcatatcgcaggacctgaaccgtaccaatccaatgaacgcctgagttaaaatccagtaagaagagccgatcaacagatagagcaaatataacccagaaaaatatgaaagaataacccgcaaagtgatcagagtcatgtcatgccgcaatgacagtcagcaaaaatggcgggggcataggaacggatgatgcaagaaacgaagcatcccacaaggccagtagcttgtggggacggaaggaagataaaatcacacagtcaagaaggaatacgatcatgtgcacatgagtttgagaccagttcgctggccaatccaacgccaacgcctaggtccaccgcagaagagaccacaatgaataaatgatattgtttcaggttgagtccggctagtcagtcagagacacacagtagcacgggctagcgtaagatgcctgggcagtgtatgtctgggcagtgccgcctttataattggtgtaggtagtagtcggcgtgggctcgttctctttgatgttgatgatgctgcctgagagaagcgccaaacccccgtcattgcgaacttgcatttgctgacagtagggagattctcgtgatgggtcgtctcggcgctcctccatcttaatcctgcgtggataagcgtaggtggcggaggagtcgcgtttagcgtcagcagtggagccagctgtgcttgctgccatgttgctgttgatagaagcagtggtgctcaaggaactcgacgtcgactggttgacgtacaagaaaaactccatcattgtgttattccaccaacaaaaccacggcttgtcgccaatttctgcggtctgcttcaaattcttgtaggcatttgcatttgcccatccgtcttccacgaatgtgcgcttagaaatggagttagagaatgtatcgtccggaacaatgaccaacttgtcgaagggagcaaggaagaacagagcaggacccatgccaatatcagtggtatcaatggccatactcaatgcttgtgtaggcgaagaagaccaatacggcgcctgggcaccatatgtaaaggtcggggtcggaacaccgtcgtcgaaaacgatggaatggtggccattggattcgccgataaaaatatcgattgtgctcggtgattgcatgcatttccaggctttgccgtaattcgattcgtccacgcaaagcccagatccattctggtaaccggaaggtaccgtgtagtagcccgtagggactcccttgagacctgtgggggtggatatcattgacgcatccatctgaggggttgcggtgaccgttatgattggtaaagggctggattgttgggcctcctggtgttcttgctttgcagcttctgcggctttcttggttcccagaacaccaccaatgacgcctccaatacatcctccaatgagcataacagttgcaatgaggaccaacgtccatactggcaggccacagcatgcggtctgtttccccttgcgtttaagcttctcttcgaaggccatgatgcctgtggtcgcagcgactctttcctccccgtgcccattatcgttcccatcaccagaatgttcaagcaccaaagcccttgatgaggtttctgaaatcggcgccgctcttgaactttcattgttgagacggtgttcctccggcggaggatcgagatcgactaccgtctcaggccctgggggcttcggtataacaccagttggatagcgtgaatacggtggtagcggctctgcgtgaccatccggtccaatgatatcacccacatcatcagcctggcgaccagcgggtggttgatatggtgggttatggcctggaaatccgactgggatgatatcgtcatccattccttcttcgaccacattttgcgagtacatcgcgtaggggtgctgcggaccggttgacccttcaagtgggcgttcaattgggcggatcgtcgaagtactacctacactgggcgaccggctaaccccaacttgtggatacataccatatggatggctgggtccggtggctccggtgtaggggctcagagcgcggggaatcgagaaacgagaagaaacgctctgattgcgctggatcatagaaggcgtcgagttgagagaggaggttgagttacggttgttggcgaaagcataccccttttgaggcagacttgaccgatgaggttcatcgaaggacacccgagcgtcatcagcgaacgggttatcgttctcggtcgggcccgtgctaacagcccttggctgggtgttttcccgaagagtagaggaggatgcaatggaagagggactgtgggggcgttcaatgcgatcggagtcaatggtttctaatgagtattcgtcggcgaagacatttggattggaggtggaggtgcgaccgaaggagcggcgaggtgtcgaatcgctggagagttgtggcgtttgagaggattgtgaaatagagcgagaatgctccgatgaaatatgaccagacatttccctatcggtctggcagccctgtcgggccacctcgttgtttgatcaatccgtttcgctacccgggcgaggatgggcgaagaatgggcggcagcaagcagatatagcagactctgtcgagatgttgaggaggaggaggaggaggaggatgttgatagatgatcgagatagaatgtaggatgagaaacttcaaattggggaaccctggaagggaagggaggagtttgagactttagtgtgaccagtttactgaggggagccgggggagagtcaactctcgggccaactgaaattcttggctttttgattttgcaccgtcttgggggcttttttccatggactctttctttttcttttctttcttctcaaacattctcttgtatcctggtatcacataccctacgatctactccgtgcctgggactcctctgtttgcgctactacgactagggtgaccaactagcgagcacttcccgtctacggtgggcctgaatgggcttcgccaccctgcatgctagtatagtgtgctattttgatattctcgagtatctgccagtacacagaatacagaatacagggttccaggtccctgttctagaccaaagctctaaggttgtttgcttctgcatgcgttggatttgaaacgttttctttctcgccacgcaaccacgtgagaacccctttgtgtgtttgggtctggaatggaatccactgaactggagaactgcaccttcagggcctccagtctgggcctccagtctgggttcgcgaaaaattccagaatacggaaggtttaaaacatcagggctgagcggatatctcggacttgcaaactataatcgtaaaccgggaaatgcacaattgctcatcatcatgactttgatatgagctgatggtcctaggacgtctcctatggacagatcttgtagcgaaaacaagggtctctttgaatgtaacgatgttggcgtaggtaaatacctgtgttcgatctcggataattacgattggagtatcttggctctacctaggacttgcagattatcaaacaccgcatccatggaagactcccacccagaaaggttacgatattcgctctcaacagagatgtcccgaacaatgaccgtatggatcaacggtttcagggccgttcagggcttcttcggtccagcccctctggaacgagattgcgtgcgtaacgggatccatccagggccaaccccatctgactccatctgactccatctgatactgagatcgggttttatttccgtctggtccctatgtatgtaagaacatcccagagaacatgagatggttccttggactgatcataagcctccaggacttgatctagatctataatatcgtacaattcggtatgcaggtcacatgtcatgtgggacatcaaagaactccccatgttctccttctgtatcagcagataccagaaatttacttcataaattgacatatgttgaaacgatactgtgtagctaatggaatgatcattgatagcctacgtagatactatacaaaccttcatcaaccatatttccctgccaagaattgcataacatatcgcgaggaggcaaagtacaaatcagctacattccaatgaaacaaacctgattcaaatgcttaaggatgtaaaaacatgcaatgggtgattgatcggtctacaaggttttcggccccatagggtcaatatgctatcggctaatagccgacgcatcttatcagaccgatacatcaacatgactcaggaaatccgtcgttacatcccatgacatattcagcttgacacaagccgaacagcgtaggacctctcggagatatatatctacacatgttcttcgtcctaggagtatgtgaatcctgtgacttggtgtacattgagaactcaatatctcgattcagtatatatcctcagtcattatcgtattactagcattatagttaactaactagatacttcaattgacataaagaatcatgattcttaactaactaactagagcacccgggtgttagtgatagttttggcgcactgtgggttcgccaagccacagaccggttatgggcttggccgtctccaggtggcacagacctcatctattccctccttcggtcagccaacattttcatttaatcttttccttattgtttttgaacggcgaatttcttcggagactccccattgctacaagcgtatcacaaattctctgtatccgcaaaccatcggtctgttccgggcagtctgccatgtttggtcctcccatcatttgtccaccagtccaaaagcattccgcgaagaattcttccaaaatacatcacgatgatggatgtaagtgaagcctatcaaaggctttaattacaaaccctgaatatagttagattcaacgaggtcaaccgtttagaggaacgatatgtctagtttcgaccaacagagctccaacggatcgccggcgaagtattacaacagggctattgccccaatgtcaataagcacgctggacagactatatatcagtccccaaagaaactccacagggcttacagcctcgaagttgtggatttttgtcactgcctcattgccgcaaatcatcctctatgcatcgcagcacaactcgcggtcataccgtatctcttatagtgagcgtgaaagcacctctctacgtaattatattcttctccatcttaggcgtagtatttatatatcgagcacaccgcatctactttcgtgagcttcaactattctagtcttccagtcgacgaagcacatcgcgttgagcttctccagcttgatctacggagcctgctacgccttcgcgtttcagttcctttcctcgctctcgctatgattttttgcccggcttctcctatcccgttctcgaatacttagacgcagacaacattatctgcgggagtctctaggagccgatacatttcttgcctcgatcgcggaagcacgtatattagccaatggggtttcctaaagagggcttactcacacaaatcagggggatgtttatctttgatttcaaggtccgggagtctatattaagaaaaatatatctttcatttcctatctaatcccccttactcttcttccaatcccggtactcagcgataataaaatatatctgtgcagcgtattgtgctatcacccatctctaggcaactgattagcgatgttttttaagcattggtatagtgatcatgatcaaacctaccttctaagtcgattatttgaactcttggttcctttgacccttgaataccgagagttgtagtaatccatggtagtatttcaagtcccttttgcatcaatacttcttttaccaaattcgattacagagccctaacttcaagtaggacgggatctaccagaccaccgtcgtgcttaacggagccgtaactgcggccaatactctgggagactccacatgtgttccatatttcgcgggacgtcgcaatgattcgcgatctcactctggccatccgtctgcgggtggtagacagttgacaattttgattcctaggatgcgacagaattccgtccagaattcggagataaactgaccgcctcaatctgagacgatagtctcggggattccagtgattcgtatgacattgtccatgaataaacgggccatttgcttcgcattggtatccttatggcatgggatagatacgggtctcttgcttaaccggtgaacaacgacgaataccgcgtcggctgccatagtagtgtggttgaaatttgggagataccagagagatatgccgtagtgatgagggtgactcgtacaccaggcttaaacataccttaagcttcacgatgcatagaccctttttcatattcccataatttaaaagcaaatgaaagtttgagagtccgtggcaaaagataaagaggagaaggggtgccgaagttttcttggacagcttagaagccctcttcatttccattaaaaactggtcgatcattctcgctgggctaactacagctgcaggcgaaagtccctcgctgtccaggagttggcttaggcatacttttcgttcctcatagttgtcgacagggttggtgacgctggccaagctacagacaatagtcgaatgatatactgtaacttaagcagtatttttgatgtagatgagagggaaaagaagagcaatcagagagtagaatcaacaaagtcggtatttatagatgggacaggtactatctacactagtagcaataggttatctaggcactcgaggtagtgtgagtctggaaggtgctaagatgtaactcgtgagtgggcaagaagtgagaaagaagggattgaaatcatataggtattaagaatagttttcttatgttttaggtctcatgctactttgttagcatcatggcgatgtgacacagatatcaccatcctaggattttaccttactgttgccgactcaaggcttacttggcaacttagtaatcgagtgttgtcgatggcgtgaattgatcgaatgcgatggaagatagcaaaaggagagtgcaataaagttgatcggtattagtggcctctaactagaaagagtacgtaccggatcctaaatgaaatagaaagggtagtgtggccagtctactcaaaagagaaagagtgatgagttgaataaggagcacccttggaatttattactcaggttgcgaatacataaaatgaattccatgtttcccatccatatcatcccttcaactccgatgtactctgtacatatctctctggctttgagcaacatttttcagtaccataataatttaactttcaattttcctaaatttgatatataggggtagagtcccttatcaacaaccaattagtgagaatggaaattaagcaataacgcggttgttgaaatatgagattgtagttatggatgtgatgggccatggcagtgagatagttatgttatcgataagtactaaattaagggtattcaccgcctaccccttgagtaatagtactaccgtgcacgtgctgaagtatatagtgcccgctgattgggtaaagccccaccgcctactatagcgcaactaaggtatccggcgattatgaggtttactttcctagctcttccagcactactgtcactcatgatttttatcaaatctcttcatcctaattgtatttgaggctggctacttcctttgcagttacacttgattctcatcatgccggacgagtcgaagggaaagagcttccccgacgtctctgcgaaactctccgcgcttccaaagaaatcactttttgagcgtcaaaaagccgaagcagaggccaaacgcgcccgggaaaaagcagagacagctgctgtctatgaagaatttgtcaaatctttcgaagacgaggattcagttgcaccacagtcatgggatggaggatccaatacatttagaggcaggggtggtggtcctcccaggcgtcatttcgcaacttcctcttcacgcggcagtggtcatggatctcttgggcccccgccgccgtcactttcacacaaacgttcccacgaaactttccccccctcccgtcgtgaccatctcaaatttgaaaacgtacttaccccatctgaaaccgacagagcacttgacgaggaggagagggcagctccaaaacccacgctatacctcgcatcgcttccccccgggacatctctgtctgtgattaaggcattgatcccctcgaccctgaccgtggacaatgtcaagatcatcaccccacccggacaattgccaacccaccgcgagtcctcttctgcactcgttaccctctcaagcgactcggccgcttctaccatcgacgcagctgtaagcacgctgcagaacaaataccttggctgggggtactacctgaccctctgtcgacatctttcctccattgcaatcaattcaaacatgcctttgccctccggcctctcgtcgactactacttctcttccgtttggcgccaagcctattccgccgagtctgggcacaagcttgagtcgagctccaccaccagggccacatcgcggagggttcgcacccccaagctcgtatggaccaagcgttggtagaaatggcccaaccactcaggtgcaggtggagctaccgacagatataagacagttaagacagatacacatgactattgaaaaactcgtgaaacaaggtcctggatttgaggcattgttgatgagtcggccagaagttcagatggacgaaaagtgggcttggctgttcgatccgaggtcgcctggtggtgtatactaccggtggaaattgtggcaaataatcacagaccctaaaaagaagaatattgataagccggcaatgatcttcgaaggtggtccgctctggttacccccaaaacagcatctcaaatttgagaacgtcactcgactggaccaatttgtgtcacaccctgactacgactcctctgacgaagaacactcggatggagaaaatgaaagacggaatcttggtggagcacctcaggacggaagcaacacacgcagcgatgaacctaacttcttgaacccattgaagatggccaagcttactcatcttcttgcacgacttccgacgacccattcgaagctccgacgaggagatgttgcgcgagtcacggcattcgccatcgaccacgcggcagtgggtgcgcctgaggttgtcgacatggctattcgaaacgttttccgcccactagcttacaccggcgccaacccaaatagggaaatggaaaaaagtgccgctagactagcgaccacagataaggacaatgcaactccatccgatgaacaattggatatgtcttctgcgaagctggtcggtctctatatcatctctgatattctctcgtcgtcggcaactagtggcgttcgccatgcatggcgataccgccagctgtttgaaaacgctctccgctcacgcaaggtgtttgaacaccttggacgacttgataaggacctgaaatggggacgactgaaagcagagaagtggaagcgcagcgttggcgcccttttacatctgtgggaagggtggtgttgttttacgcaattgaaccaggagcatttcacccaagtgtttgaaaagccaccgcttacggaagcagaattacaaaagcagaaggagacagagaagaccaatgcagatcaagctgctgttgcatttgccaagagcaagagtcgatggaagacagttgatgatgagcgaggtgggaagtttgaccctactcgccctgcgaacgagaacaagctatctctatctgcccacgcagtggacgaatcggtgcatgaaaaggacggaactgctatggaaatctgtgagctgaagaatgttgatggggagttcatgcttaaggcgccactatcgggcgatcaagatacccaaaccgagattccccagacactatctcagaacccacctcagcacccaacccaacctgataaatccgaacaatcagctgggcagcaggagccagaaacacggcgacggaagccacggcccaaagctgaggacatgttcgcctcggattcggagtaaggttgggcattgtaattataccgattagcatcgaacgataccaagatacttgtaatgaatacaaatgaacataaatgaacaatgaatgagtacttgaaatgttttctctctatagacttgtgtagatagagacagttatactgaagacctgtcagttggaggctcttcagtacaacgtatcaggcagccaggcatcatcggcagaacatttcctgccccacaacccctcatcaacaaatacctttctcctttcgcgctcaacttcctgtaacctttaaatacaatcgcatcggcttttttctcttgtattccaaattcacaagttcttcataatggctggtatgtcttcctctccacttggttcctatatgcccctcctgaaggggatggaggggtctggttggatccagacagcagtgtgtgactagttgcgcaatgcgatggaaaagacgaaagaaacactgcaaacatacatatgagacactggctaacaaattgggcaatttatacagacttcaacgctattgcccgtacgttatacccacactttcctggttcatccacaaggatttagcaatgcgcctgttccccggagcctgtcctcctaggtggaaatatgcctgaagagatgggtgtcatattgtgtacaaataaccatgttctaacctctgatcgacctgtacagagcagtttgtgcagttctactaccagacctttgacggaaaccgcgctggcctggctggtctctacgtaagccccgctctcgagatattcttccaagtgtgtttatggactaatagcaattatcaattaatagcgtgaccagtctatgcttaccttcgagaccagctcggtccagggtgttactgccatcaccgagaagcttagcgttcgtcaatcccaaaggaatagcagaagaatatttcaatactgactgacttttgtgactctagactctgcccttccagaaggttcagcaccagattgctaccttcgatgcccagccctccagcggagatggcattgttgtgttggttaccggtgccctcctggtatgttgaatgcctatgacttcttctattttcttggctaatcaatttctctaccaacaggtcgatgaggagcagaagcccatgaactacacccagtgcttcaagctgcagcccgatggtgccggaagctacttcgtgctcaacgatgtcttccgtctgatctacagcgcccagtaaattatgggccccgaaacaaataccacgacgcgacgacagggtgatgtgctttcttgtgaagaggatatgccttgacggtggccgggttaagacatctgtcgttttgtcgcaagtgactcccctcaacttgcgatatgcccattgaaggattcatgaagaatttatttttttggaccatcgatcattctagaactgtatagcatttcatttctatcaagctaagatatagcacggtataaaagcaacacatagcacatttgttatacggacatcactggctctgaagcaacggcgtctcctcagatggtcgctcctcatgcacaggttcttgctgagcgctctcatcagcaggagccgactcatcgggctccccggtttgatcaacgtgcccagctttccccttgttgttggatccaaagtactcaaaatagattgccatcgtcaacaaggtaccctgcaagcaagccgtgacaacaagcacgccccagatactccagccactccaacccttacgggcagccaaactagcagcccagacaagacttccgggcgtctggatgcacatcatggggatactcaagctccccacgcaacgcagccggaaggtagtgtatatctgcgggaagtactggatcgacgcgaggatcgcagccaggataccgaggaagttagcccaggtcgcaacagcggccgggtagcgtagctcaaccgctagggaaattataattgtaacgagcgcgtgcagtagacatatccccgttacgatgagcgcggtgcggtacgtcggtccgctggaggtggaagacacactgcccaccgggtctgtgggggatgtagcgcgcgggaagtagatcacgaatagcaaaagactatgtagatatggtcagacaagctcgcgtgggtatggtatggtatggtatgggtgtgggtgttcaatcgggaattcggaatcagatataaatcagcgcttcgttcgactcacatagaaaagaaagcaagccattgcatggccatctggaatacacccagtagccctgcgaagcaagcgaatccgctgatatcccggcagcaggcgacatcttgtgcggtggatgggaataccaggatattggcgaaagctgaggtccctgatgttacacctaggaggataaagtatggtgagataccgaaggagcttcgccgggcgatgatacggatgtgttgggggaggtatgagaggaggatcccgaggataatctggctatggtacgtcagtgactggggactgattttaattctaggggcacgtacatagatagagcagtttggaagatgcctggcgaggccagctcgcggcagtagggtgttaatgagtccattgttgtgtctttataaaaggatgaagttcagatggaggtcggttgtcgggagcttgtgacgacagcgctgattaccacaattgattgcaccagttcgtcacatcggatattctgctttccacttcaccaagataagtggaattgctattttcaaagacagaaaaggaaatcctaagatatgtatcataaacttgaggacctcgttgggcactcctctcctctgtcatgttgccttgttgtcttgacgccttggtgccttggtgccttaaataggtggtgttagtctttttactatccctagttgggattagtgtcaaatgtctacaaccttatgtacatctggggaatataacatggattcattaccaccagaattgatttcccgaatgttggactacatcattcctgtcagatattcacgatctcccgacattcccctgacttcatatgccaccttgaatcgttgctagctgctacttatcgatcacctatttgtctgatccggggtacgcatctttagtcagcacctttagctgattatgtaacccacagttgagcatctgcccatttagacacttacactcataccttttgtcagtatcttattagttcacagtcctatcgctattgtgtaactagttatatgtgtactcatttctgtcatatgtcactaccgtacgggaatggcaaaataataactatggcacgctaaccgtattctgtaattcaccgtcatcagatactacaatggatgtttgtatagagctggaaatatagatacaaaagtagcatgtatacatatctacattctatacattaaataacagaaacaagctaggaattgttcccgacctggaataatgaattgatgattcatgcactcttagctcaatccaaggcaaattccccaactacgtcacttcgcaatcatccatgcttggctctttcttgcttctttctttaaaatcttgctgtgtttctattctcttcactgaaatattcatacttcacttgccaccaaaatacccctattttgtcaaacatactacaacatgaagttgaatttggccactggcctcatctgcttgctcgcttccactgaagtagtggcagcttctagctggtggaacaaggctcgtatgttgtcttgggtacaactatacccttcgcaagctaatatcatcaacagtctacaacaaatggcatgaaactgagctcgagcgatggctctccgaccatagtatggagcacttctctgtctagcagcttcaattactcacaattcacacagatattccctaccccagtcctgccgatcgccgcgatctggagaacctcgtcaagaccaactgggacagcagagtgcaaacaccccttggacaagctgtcgacaacgtcaatcatgagctacaccatgccagagaatggatttttgataggtagggtgcttacctttccttgttgtgaatgatagctaaccggtatagttggtctgactctcagttgaaggcattcctcgatcgccacggcatccctgccccccagccccgcagacacgaccttctagtcaaaaccgcgcgtgagaactatgagaagatcgctaccaaggttggccaaacggctgcctaccccggagactggctttatgcggagtggtccgactcggatctcaaggaatggctcgacgagcgtggatggccggtgcctcagccttccgagcgtgacaagctcattgcctcggttcgccgcaactcgcgcattttcagcctgcagacccagagcattgctgcatctgcatccgctgaggctgaggctgttaaggagacactgagtaatcagcttttcaatgcctggtccgactcgaagctgaaggaattccttgacgagcacaatgtcaaggtgcctcagggctcgaagcgcaatgaactcattgctctggctcggaagaaccgtcactacctttctgaccaggtgtcgagtgcctcctccgctgtagagggtgcgtttggcgctgctaccaccaaggctgggaacgaatatgcacaggctaccgattatgccaagctgaagatcgacgatgctttcgagactgcgttgaatggctggtctgactcccgcttgaaggcgttccttgatgctcgaagcgtccctgtccctcagaatggtaagcgtgatgaacttattgccaaggtccgcgccaatgcgcacaaggctgctggaggatggaaccagtacaactttgatacttgggataaagaacacctggtgtaagtacatacttgtctgctggttatgatctcactggcttacctttcctaggaactacttgtcgtccgtgaaccacaaggcgattaagcaggccgatgcctcacgcgaacagcttgtgaagagtgcccaggactcctacgccaaggcttccaaggctggcggcgaacagtacgcctctgcgacttcttccatcgcgcatgcaacagacacagccaaggatgctactttcgaccaatggtcgcactccgagctcaaggaatacctggacgactacggtgttccgacataccagggctcgagcatcaatgaacttcgagctgcggcccggcgcaacgcccattactataagtacggcactgcgagcccgcaagctacgatctacgccaaggtcatgagtgttttgcagtggtttgccgatcagttaaagatcggcgctgctagcggccgcgcccaaggcaccgaagctgctgaaaaggtccagaagaaggtttccgagcacacggagagattgcgtgaagaactttgaactaccctccttatatttgatctttcttgtttttgttccacaataatttgggatgcacggttggtttgatgtattttaaagttacgatgattatgacatttggattgtaacctgtgcttcgagttagttttgccttttgggtttacctagtgcccaaatacgccgttcgtacatatgtaaccacctttcagcataaaagaaacgatctcgcccacctttttagactgggtcttcctatagccgccgagacctctacttcacttgtgttatctcgaagatgacgcccgggggggggttgaagtcgaggccggcctccacgacttaaaactacaacacaacaaagaccatttccgactctagccttttcagggagaatcgggcgtctacgctccctacgccggtcgaggtgagaaccatcaacgaggagtcaggcaacatctgtggcacaagtttcaaccgacctccgcctgtcaagtttccatcgttgggcctgattgtcaaatatggagccgacaccaccgtgacagaggcagacccaaaatatggtatacaagcagttgaatggcaaagtaccagttcctgaggtgttggggtggaccgaagacggtgaccaagtctttatctatatgtctttgatagggcgcgaaaccttggagcaaatatggggtgctttgaacgactaggagagagaggctgtctgtaaagagctcaacggcatggttaagtcttggagatcgttagaacagcccaaccaagtcctttatgtgggtaagtctcattgcggtagctacgcagaactatgctaaagtgcttcctaggtggcctaaataatcaacctctaaatgaaatctttttttttggccaccgcgacctggctgcccattctacggtgcagacgccgtccaaaaattccagaatggctgcgatatcgagattgatggggaggtgtctatggtcttcacgcatgacgaccttgtgcccccaaatatcattttatcgcccgggccgaatccagtagtagctgccgtcattgattggggccaggcagggtggtatcctgcttactgggagtattacaaggcgcgtcacgtcaggccgaatccggaatattttgaagacttggaagaagaatggaggacgagatacctgccaactattctggacctggtcgatgatgagactgtataccacctttggctgtggtttgtcttgcctgagggtttctagttatgtgaatgaagatgtgggactatacaaccgtggtagatagacaatatatatgaattatgtatatactgtatccctgacagtagttcctagaagatctacggctcccaggagtgaatgatgtagcttcaatgaacgaggagtcagctcatactaactatgtctgcttggtcaatggacctagccaaagcatgagattcgcctgtcgtcttcatattgaactgcgggtcagttgcgatagcatcctggagattcaagagggcgatgtgatcttttgcaaaaggttcgatgtatgagtaaatattctacctttatccaagcttcaaatttaattgcttattaaataccaattcccagtttatatacaaaattcagagtcagatatgcgtctcaaaagcggttattttcggcgtcaatcctataggctatgtgtaaaatttgaggcccaaggttcttattctagattgcttatagttttttattccaagatggaaaatacaggtacaatattgtagttaccgaggacggtgaaatgaagtacaacatagaaaaggactactccgtatactataccccccttgcatccctccccacccgagcggaggcatataataaccacaagtttccatttcacaccgctattttcctgaattgccactctatctattgagcgatttacaacctcatttcggttagtatactagtcggcggattatgcgttgtccttgacggtgtaggattaataatctgatccatttggtctaggctcatattatggatgcgatatacaatcctctagtcttttttaatttctttttaatcgctttcatcttagtatattgtataaagactcccgcacataatctaaaaagtgcccctataggcacgtgactgatctgcagcctcccgggatccccacttgacactcccgaggtcgccttcctcccgtccaataaaaccacttccgaggtccaccaccggttttccctccgttgtgtacatttcatcgcctcatacgtcatgccgaagagcagcagcacatcttcagtgaagcgtcgacttcgaatgctgatccatggccgtagagctcaagtgatttcaagacattatgggttccaaaatacaagaccaagagcagcagggaaggttctccccacgtatatgcaaaccaatctgctaccccaaacccaatcttcttcggccgccggcaagcatccaaacgccgctcctatcactgctcctcggctgcgtgcccgaggagccggtgagattaatcgcttggactagtttttcctggccgtctccgctcccttagaatgtctgcacactggcggtcaagatgcactcgccaacgatattatgcatcatataaaaatgctagtggcagagcattgcccagccggcttacaattcagggacctgagatagtcttgcaaatcaagcccagattcggttgcgcttttaaattgatcctgaaaaaaaataaatcacatatcccttggcttgtcctcgtaaatgaaatatcggttattgccgtacacaccctccacaatgaatatgtattcacccaatcgttttagtgtggaatcacgatttaggagcttcggggtcaccctcagccaccagctttccaacgaccaagtacttctccatgaagcggtcttcccaggactgcaggttctccagctgatccgcatccaaatccttcaaatcatccaacggcgccgacagatccgtggtcagcatttcctcatcgaagctctggaaagccaagccgcgcgacgcgtcccggccagcgaagttctcgtaaggtccgccctgttacatttcgtcagcttcagctccaacagcgccacccggtgttctttcgcgaatttcaaacacataccggtccatagaagttcctgccaggagtgacgtcgaagacgcgcccgcggacagacaagtaaacggggcggccttcctcgccgttgaactcaataagagttttgggaatgtaggtcttaaagacagttggcggcggcgcacgggggagagtgatgggcgccctgggacggaagtgccagtacaccaagactccgaagagcgagactaagactaggttgatgggcgtcgcgatagacatcctgttgggtagcggttagttgggttggtgacgggtgagatctggggggggggaacacgaacacttcaggctgtggcgcagaatgatctgcagttttagtttctagattagcgggtgttcagaacatgagcagcaaaggacatacccatcgaggcagatcttttgtatttagagaaagcacaccggaacctcgggatgacatcttctccccgctccacgtgattggaagcttacatattctctttcattctttggcttcatggatttggatttaggagtcgtctacttctctcacgtgcgggctagagactaggctctcggacttcagattgaaaatgtaaaacgccgacgagtccctgaatttgtttcaagactctccactgactatcgcccccaatttaatctgcccactcctattagcggatgtcatgttatttcaagtttcaagttatttttatcgtctagttcctccttccttgcattttgcctaggtgttcgagtcatttttatctatataatttgttcgcgcgttcttcctttattccataggcttccgtggccgtgcattgtcgccgagaaaacagagccccttctaatattctgcggtcctttgcctcttctttctccctttcatcctctctgttgtgactgaaatccattccatcattttgcgtgaactctgcgctatcatttccgaccaaaatcagccctgtgtcacgtctagagcgtgagaaaatccgctatgtggtctaagagaccgtttcacaagcccaaacggccttcgattagcggccccatattgaatggcaatccacctaccacatcagaccctgttcatgatatggtcgccaaaagattgcccgctctgcctgagtaagtcttgtgtttgctacgtgttcaatagatagctaatggaaatcagcgacttacattcattacaatcagatgtcctgcgtgaggatatcgaaaggacgccgggcgtgtcgcctgccatttcgccggtgcttgaagcgcacaggcgagcaagcgaaagtagtttctgtgtctcgcctattggcgacggcgaccaattttctgattatgcgcgacaggagactgggaccttgtcttccccaactcctattcccaaggcagactatgttgacacaccctctcactcccgggttcaacctgtccaacctgtccagtatctccaacatgattacgactctaggcgattcatctctggtaaatcaacgcactggaataatttttcagccgaaccgaccttgagtgatgttgttagagttggtgatacccgtcaaacctctctccaaaaagcctccggacctggggctcctgctcctgctcccgctcccacttccaacctactgaattggggccaggggttcaaccccaagaagaccctcaatgcagctcgaagccggatcaccagtttctcgaagaccgaagagctttcgcaaaaggcacccagaagtagatcggcgtcacgtgggcttccagtggaagagcgtaccagcaaacgcaacggcaacggtgcgctaaagacgagtccccagctcgataactttggctttgctcctacaactgtgaccactatcaccggcggtggtccagcatccgttccccggagaccggcaacagagcacgcccaaagccgcctaccagaggagcagaaaccaatattcaagttcgataacgatttcagcgacatgatgttcacgaccgaggaatccattagccgtttcagctcaaccacatacacagccaccgagccgggaagtcgagatccaagcccgcgagtgagtatgcagcttgaaaaccgatctatggacgatgtttccacgtcctctatcatgtcccgacgccgcccaattccaatcagcgtgccgacttcgaagaagcccgtccgaaaacccactccatccgaggccgcacagcaaatcgcggatatgtccgctcaggcatcttcgcctccacccgaggtgcctctcgatgcgcatggccgcattaaggcaatggaggacaagagggatgacctgaatcagcgcagattgaatttgcaggcgttaatcctcgagttgagaaaggttgttcatcctacttcagctgtgtatgacctggctgctagaaccgaggcccagaagagcatcaaaggcattgaagacaagcttgcagatatcaagaaagaagagcacgatcttggcctgaagattactcgagcgtggcgtcgcctagacgagaaggagaatgccggcgatggcaataatctctgggtcaagcgagtcactagttagtggctgttgagttgtgaattggtccatgcgcgattgatcttgatttcatttctgcgattgtggagttgttagcgtcctgtttgattctactttttcaaggcaatgtgcttgttctttttccgatattgcgacatggtggttgtgttttgagcgttcgattccctgcattggcagcctacatggcaggatgatacccacttcggaagcccaagctgtggcggttaatgttgatgtattctagtctgattaatctcattgcttttttaaaaacaggaaactcgtatgtgaaaagcgatcaagcgcgaaataggtattggtggctaaagatatacagaagacccatagaaaataactatgggtgcagtgatgctgacgcgatcacacagccacccatcctccgctcgctcattgtacatggctcgtgtaggtcgtgaatatggactcaagaaacctggtgtcaaggctcgttgggggattgttggcaagcgatttatcgaggagtattcgatccgtttatttcttgccggacttcttgatgccttgctggccggtgttgagaggacccttcttgcccttggccgcttcctgcatgtccttgcgggccttggcatctagtggaaattagtaactgacttcgtgaagagtgtgtcaaaagccataccagccctgagcttggcctggtgagcgagctcatcctcatccagctccttcttctccttcttggctgccttcaagggcttagccttgccacctgtagatcataaggtattagtgaacaggattccaaggactagaatgcgaggtaatacgaaccttctctgccgataccacccattttgtccgaataaaataactgggagagcgggttggaaagagtcttgatagcgcggggtgtttagacggcgttggcgaagaaaaatttacatgaggggtgcttatccataccttctatggctggggcgaggaccgggctatttttgtgaatgttactagcggtataaaatgtggtattatttcaagaaaatacacaaatgttgtgctgcaatcacactgattacataaatttagcattggtgataccctaaggctagactgtatatggttagtgccatatccaaaagttatattccccgcggagatacaccacagggtagacggcaaaaacttcaatccaccgcctacttcaaccagactagcgtcgattctgccttatcgaccattgagcaactcgccatggcttttcaatcgttctcttgctgtcatcgacatcctgcacgtgcttttatctacttctcaagcctgttcttcagaaagctatgcgcctgggattttaatcacttttgcaaggctttggtgtgaaggcaggcctcttacagccggttggatttcacaaaccctttgagaagacttattgtcgctggcgcttttgctaactaagctttgttgttgaagcttcactccaaaagctgagtgaagtgaacccaagagaaaagtactgtacatacgtgtcgtttgaatccctcgaacgtaaacatgtcccttcccaggtcgaggtccccatcggtcccctctgagggtgagatcgtcgaatcaggcccagagacgaaggcaactgcgtcacaacctcctcttaatggcaccagcgttgaccgtcccaccagagctagcccatcctctgcgcccggatctcccgcctcgttgaaagacactcgatcgccaccccggcagaggtcgcggaccaggtcccactcgagatcccgctctcgctccccgtacagagagaataagaccaagcgcagtctcgacgaccccgagtcctatgatggatcctacgaccggcgaccccgcaatgagcctccgcggcgctacaggtctaggtatgacgacagacggcgtgacagacctggtccgaacaggcgcccgaactcatactacgactatgaccgcgaagagacgtacggagaagcgctacgatacagtgatgattacgaccggaatgaccgacacaaggacaagcggcagcgcacccgcagccgctctcgatccccttaccgggaatcgagaaaacccaagcagtattcaggcgacgaacttgatacaaatgttaatgccaggtcttcagcggataatggaaggcgcttgcccactgaacagttggtgagggaacgcggaaaggcttcggttggagcttcggacttgaagcttggtgctgaaaaagaaaagaaccaggtgcaggcttcttctaatctgaaagctcatgtggctgacgagtatgtttattttgttgctggcgaaaaagaacgtgttgctaatatccatcccagagaaacccctaacccagagcttgcgcaagagccggagctggctgagcccattgacgaagctgctgcacttgaagctcgtcggaaacgccgtgaagctattcgggcgaaacaccgaagccaagcgacgcctctacatctcaaagcactgaacgtcgaggttgaaacggattcatctacgcctggcactgagccaactagcgcaaaggaagcatctggtatgtttctctcggacaagcttaccctggtatcgaaactgacgcctggaaactcaatagattctccgcgagcatcccccttcgaacaacccggggaggcatttcctggcttcgttggaaaagatatggatgtggtcaaggccaatgcgcctgttggcactgacaaggatgagtcctctgctgctgattatgatccaacccttgatacaaaggaagaaagacaaaaacatggcaatgttcaggatggaaaggacgacatttcgtctgcagcatacgatgaaactaagactggcaagcaagatatcctcctccctgatgctcccccagtgccaccgccgatgaccaaggccttcgatatgtttgcagatgacgacgatgacatgttcgcagaggaagaacctgatgccaagccggcgcatgcttcggccacagctgtaccccagggcagggaactagacgtcagcatgatggataactgggatgattcggagggctattacgccgttcgactgggagagctgatcaacggaagataccatgtccatcagaatcttggcaagggaatgttctcgtccgtcgtacgtgcaactgacacgcagacagggggtctggttgccgtcaagatcattcgccagaacgccatcatgcgcaaggccggtatgaaggaaattggcatcctcgagcaactccaggaagccgacccgctaaaccaaatgcacctcatcaagttcgaccgatatttcgatcacaagggccacttgtgtatggtgtttgagaaccttagcatggacctgcgtgaggtcctgaaaaggttcggtagggacattggcttgaacatacgcgcggtacgggcctacggccagcagattttccttgggctgtgtcaccttcggcggtgtaacatcctgcatgcagatctcaagccagataatctccttgtgaacgagcaacgcaacattctgaaagtttgtgatctaggttcggcgtcgccggcctctgacaatgagattacgccttacctcgtcagtcgtttctaccgtgccccggagatcatcctgggtatcccttacgactacgccatcgatgtctggtccattggctgtaccctctttgagctgtacacgggcaagatcctcttcacggggcgaaacaacaaccagatgcttcggtccatcatggagtgccggggcaagtacccgccgaagctgcttcgccgcggaaccttgtcgcctcaccactttgatgaaatgctcaacttccacagcgtggaggaagacaagatcaccggccgcctgcacaccaagattgtggactttaagaaaccgacgcgggacttgaagacgcgcctcatggcacagggaacccgcgggatgccagattccgaggttaaagaactgagcttgttcttggacctcctcgaccggtgcttgagtctcaaccctgagaaacggatcacgcctgccgaggcattgaagcacccgttcctggcccctagggtgtgaacaaggatttgcattgattcgttgaccagggtccaaccctggtcctgggacggcgcagctcggaaggatcggcgttatcggggaggttgatctatgaggggattctttgtccatatggaacagtaactaggttcaaatcaagtccatatgtaacattttcacaaagcaacccctgtccatcctcggaccatgttgtaggactcctgccaaaccgggagtggcttaggatttatccaacctttcattagagcataaacctagcgcagtatcgaacaaagaaacccaaccagctcctaccaaaaacaacctagctctactccgtacctaggccccagcacatcggtagcgcgcgataatccattcatcactatcactatcactatcaccaacaaagaaccacccaacaaacacaaggcccccgtcgcggcgccccccttcccttcggccctagccccctatcgacccaagcccctggaactatagatctgtacaaaccaggtaaccaactaatcaaactcaactccactccacgctacctatcgtataattgcaagcacatcgtatgatgccaaacaaagaaccccaaaccttcaagcccagatccaatccaatcccaacacggcaacacaccaaactcacgaaccctcggacctcccctccccgcgagaccactaaaaacagaaaacccacgtagccaacgcccacgtaagaaccgtaagaagttctagatcgcctctaagccaaactcagtcttaggccagtctgcacccgtggcttcgtgggtatctagccgaaaccttgggcgttttccggttctgagtttctgattgtggggaggtatgaccttggattcgggatagtctatcttggttgaaccatgggaggaactattaactaggagattgaagataatagtccgtagatagataatggataatagataggtgggtgcgggattatctgattggcacggtgcgcaatgcatgtcgaatggagtacaggacactagagtgcactattgcctcctttcacgggtctgttctcttaggggcggcaaaaggcggggttcttttgcaaattgcgctcgtgtttcccggccgttggtggccattgggtggaagacgtgtcgtcgaggtaattgttggcaaatgggaggatgggagatggcaggatggtgaggattggctttgggcttgggcttagatttggatggatgccgatggctgccgatggagtgttttttgtttttttttctgcgtttgtgttattatttgcttttggtctggctagttactgttacttggggataattgtttctgtatgttgtatgttgtatattgtagttatattgtacggtcggaaaaagcaatgcgaaatggatatctgttctgtgatttacttgcatgtgtttaatggtctacgtactcgatccctagtatacaatgtacatcatacctgtagtcatcatctcaatatccaatatccatttcaactatgtttgcacggtcatacaattccgttgtagtccatgggctgcttcaagtggagtgttccagaaggcgacggcgatcaacggaagaaaggagccccttgccaccatctgaaatccaggacaaatgcaaatccaaatgccacgagcgaaaccgcccgtggcaaaagactccgcccaaataggacgggcgtttaatctccggccccctttcgtcaggttattggtctattggctgtgatcgggactagacatggatgttcgcgccatgttttcttagccccgagtaatcatgatgtcgagatgtgtttatattgtgggtcccgccacctgcagggcgagggcatctacacattggggagttgggcgttaagaggcaattgaagggtagctgtagttattactccgtaaaggagggcaatgtgcttattgggtgggagatgggatcggcggttgcagctgagtatcatgcttgcgttggagttagtagttggtttccaataagttggcagatagttacattgtatgtacactattctctcacagtcgtacagtaaccgtctatgctgtctccgtagttaatcatagcggtgtagaccgaaaccagaagccgaaaccaacgctacaacacctcacacgcccgaacacaacatctgccggtcgcagaaccaaaaaaagcaacaacgtcgcaaaaagcaacggcccggttccgagcgaaaacgagagcattgcttgctctttggacgagccagctgcattgctaatcctggggtacataactaccggtaatacattagtctatggtcggaggccaggcacgggacaccaaaagggacgggcgtcttatcacaatcacatatggcacatatcatatcacacgagtcggcagcttctacatcttgtcagacagcggacatggtacaggtacatgagactctctgcatgggcaggtttcgggtgagaaccgataacggatgtgatgaatcgcaaccccgggctttctatcaggtgattggactggatgcgggcaggcgtcgatctagggagctttgggtagagggttggttgctcaccgcaatgtagagtacctagacaacataacagacacatctcaactataacatataccatatacaatatccaacacgcatataatatacagtttgaatccatcactcggatcaatccttggcccttgcctggtatatgacgcaagtgagatccaaacaaagaagtgagattgaagactcgacgaggcaactttatgtttgcaggggctattcttaccggggctgtgcggagtactggaactatggagtacatctccgtgcttacgagagaaaggtagcccagccacccagaacatagaacggaaccagaacagaaccagaaccagaaccaacagaacgaggtcgacctcaagaatagcaccaataataatacgagcttcctccaagccgtccgagaaggtcaaggtacattagcgccaggagaagcagatgaagtgtatggcccgtgcagaactagtcagcagggaagcgccaacctccactggccctccactggccctccactggctttagggggtttctcgaaaatcgaacggttcgggcaaatggttggccatagcgcccctccatcatcgcctcactctcggacttgtttagcgtgtctagaccaagtacggagtagtactcggtggggtgtgggatagagttgggtgtctgtgcaaagacggtgtagaagatacctggtctcttcataaccaacagagaacataattagttcagacagatgcatcaatcattccgatccatggtagcaaaggaggagtagcttggaccaagatctcaatgccatagctttgcggggctggggcctgattggcagaatgtgagtggcgggtgtgttggcagtgtgtcgcagtgtgtcgcagtgtgtcaggaggtttcaaggcagaaacaccgttggggggaacaggggttgggatacgtggataaagctttgccacactaggcccagaacggaacaaccttgtgcagcgtggaaactggattggggggaaataggagacactctgcagcgtccaggtcgatcgttatgatcccatggcccaatcatcggttgtggcggctgcaggaaagaccggccgaggtctaatgattggtccgaccacactcgggcatgcacaccgcttcgtacacatggcctattattattttgggggaataatctggtttagtgccactccaggtgccactccaaggtgtgtatttttgtacgcatcatagatttaattattttgattttgattttggttttattgtgattttatttaattccttttcattcgatcctttcctctttcggtttttaatataatttccttttcgactagcgcccttttcccgtttgttttattattgttcttctcgaaccacgaggcggccatctgcctgatacatctctataataatcctccttctctctcgacttcgcgaccttgtatatttcacatccctttcttctacctcgactccctcgccttctctctttgttttgttttcatccttgtatttgttcttacttcctggtcccttgtgcaactctctccttctctcgacgtctatcaaacacaaccagaccggaccaaacggacctagatcggaccatcttaaaaacaccccattggattggaatggatgccttttgaatatccgtggatttagtctcttaatctccctggatcagactctttgcgctctctctcttatctcactctttcctcgtctcatccgggagaggaccattggatcccctctacaccaaggacatgtacccggcaatgctacccacaccaccaccctcgccggtgccccgacgctatgcgcccgaagatcgcctaggactcgtattagccaaccggctggaactcaccagagtcctgggcgtcggagcctatggcgtcgtttacaccgccgtggacattcacaccaacgaggtctatgccgtcaaggttctctgcaaggatggtctggatgcccgccaactcaagttccagcagcgcgagatcagactccaccacctggccagccaacaccgcaatgtggttcccttggttcgcatcatggattccgtggattgtacctacgtcgttatggaatattgcccagaaggagacctgttctcaaacatcaccgataagggaaactttgtcggcaatgactttttggccaagagtgtgttcctccagatcctggacgctgtacaattttgccatacgctgggaatctaccaccgggacctcaagccggagaatgtcctggtgaccgaaaatggaatgaccgtcaagcttgccgactttggcctggccacgactgattattatacgaccgactttggatgtggttccaccttctacatgtcacctggtatgcctcaaccaccctctttactatggccgtcgctaactttacatgtcagaatgccaacaagccaacgctcgacccttgtcctgctacatgtccgctgccaacgacgtctggagtctgggcgtgattctggtcaatctaacctgcggtcgcaatccatggaaacgtgcctcgattgaggattccacattccaggcctacctcaaggaccccttcttcctgaaaactattttgcctctctcctccgagatggttagtattctcagccgtgtctttgagattgacccaatgaagcggatctccatcccagagctgcgccagctcattctggagtgcccccgtttcacggagaatcccatggtcccaaccccctgggtgccggagcagatcgactacattccccagccccagatgccattgttcatggcccccatggaacccctgtatgcccagacctcaggctcgtccttggactccgcgcaatactcggccttctcccagtctgctgcttccgtcggttcggccatcaccgaggattactcggatttcgataccatgtcgcctgcagtctcgcagcagatccccgattacaagggcttcccttctgtctgcgcggaacccttctttcccgcggatcccttttcttacggcctcatgcaccctaacctccagggcctcgagatctccgtctaattgctccttgcctcgcagctgcatgacttcacgctcttctctacgtttcctctatcgaatgctctgcgggtacctcctttcgcatatctccgggcccttgctcttctctctcctccctccgccaccgagcggattcaaaaagctaccgaacaaaaagttgatcgcgttgatcatgatccactggactcggctaccagctttcttttcccttggacatatttctttactatctttcccttggaccacggctttaccctggcttaacgaccgcgaccttgcatggaccgtttgaccacagtcctgtgtcccttgcgaccgggtctcctttcttactgttttaatattcccaaatacctggaggttctttttacgttcccattttctggcgtgataatacactgggaagcatgatttgaagacacgcccctgggagggctgatgaaatacgggctcttgtttattcttttcggattggtgtatttggtcattttcacacggcgttgacgcttgttcgatttttattctctgttcatcttttggggacggctttttgttattttgacgacctaagggtgtgatctcgttctactcatgtgcatagacttttttttcgcattggcgggacatttcgggacttgttcccttttgattgattcttacgatatgatacctcggtgtggcaagagaggaatacttacttgataatctacaccactgcatctgcatttctattacagcaaattttttacaattcccgaatctcacctgcgctgcattccttgtaacgtttaacgtcttcccaacctcttttctagtacgctgttgtgcgacgttgcgccgtatgacaacggccgagactcgattcggcctgggatgatgctttgtgtttcgttgtgtgatggcttgcgccactgtgatatcgctggctgcctgagtggcacgcaggccgggacagatccattccgggttgacggtatgggtttggatggggttttacagtactaaccctgtacagctcgtggttgatctcatatacaacatgcagcagggtgacatatacatacacctcacaatctcaacacgatatatatatctatatacacatacacatttaatgaagcagatatatactattcaagatccagcccgcaacctggatatatatacatacaaaatctacatattccttccacctgtaacccgaatcgtctcaccattaacataagaaaacaaaggcgacgcaacacccagaaccgccctcgccgcctcaacagggctcgccggcctacccaggggaatatcagggtacgcaggcgcaatctgcttcttctcctgaccctgactctggtccgcagaggaaccctttttagttgcaagctgcttacccgggattccaagggcaaccttcgtgccgtcaggcgtggtgatgaacgcgccttcttccttggcggccgtcagtcgtgtagttacgaagccgaaggcgatggtgtttgaccgcacgccgaaggatgggccccattctttggcgattgtgcgggttagcccgacgacgccggctttggcgacggcgtaatttgcttggcctctatttaggattttaggatttggtatttagtaatgtagtaagtgcttgttgttgggcgaggaagagaagagtggggattggaattgggggctgggagttcggggtcgggtacttacgcattaccgtggatgccgctggtgctgctgatgttgatcactacgcgcggctcttggtctttgacccggaagtagggtgctgcggcgcgcacgagctggaagggcgccgtgttgtggacggctagcatggtttcccattgcttgtctgtcatctgtaattcgttagtgggatgctataactaacattgtagctggtaagtagtatatgtcccaccttgtgaataacaccatcccacgtgaacccggcgttgttcacaataatatggatcttgccattgccgaattcggcagctttcttgaccagttcggtgatgtagttgctgtcgaggacgtcgccgacgacggcgagagcgcggccggcctttgcggagttgatcgcgtcagcgacggcgttggctttttctatttgtttgttagatatgtacaaatttcagtgtgtaatggatctcactggcgtcgatatcagcgactacgaccttggcgccttcgtttgcgaagagtcgtgctgtttccgcgccgatgccttggcctgcgccggtgatgatggctacttggcctgccaggagaccggccgggtagttcaggtgctcgttaacttggttgagacggtcgaagggagccattttgggaactattgagtaaattgaaggtgggcattgggcttgtaagaggggaaggtcttatacaacctctcggctctgggatcgccgaggctcaccgggaccgagattgtggggtatacattgagagatggggtatgactatttattttgatattgcagttagttggttactttgcttactattctatcgtatataggcgaagtttttcgattttcttaaatagccgatctgcgtttgctgtccagcttgtgaatccaactctaccccccctagcgtatagaacaacaaaaacagttgacctcccatatgtgggtataattcagagagactcatcatgcatcactcgcccagatccacagatacactctccccatgaagtcgactgtaagaatgccgacaccgtagcttcgtagcctgcaataatggaaagcagcccttcacttctgggtgtgctcggaatatcaatatccaagtcgggaaataagccgatatgctccgcaggagaccagtgaccgatgtgctcatctaatagctttgattccgatgaactttcatggtccaacttggagatcagaacgtcggcagcattagcagtgcttttcagggccagcaatacatcccggcactgcaacaacagaccccggagcaggaagttgcgtatctgtctgttttcctcgtggcagatctcatagtatccgtagcgaatatcgacgccatgttctggccgcggtgcgcgagacgtctcccgcgaaacccagtactcaaagagctggagcgtgagattgagcactgaaatactgagcagcaggttcgtgctgtctttcgcgcatttagtacactgcaggaacatctgacaggcgcagaatgtgcatttgattgtctgcagactgtggtccagccgcaggggcatggatccagcgagtaggtggttcagccggtccatgtggaatagctgcatgtccacacactcgcatggcgagatcggatacggcgaagccacggagccggctagagacggactggccatgctgtcagccaggtccccggacagaaatgtcggcgtcacgggcgtatgtggatatcccaggccggctgggagagcaggacatggatccacaagatctgtgaatggagagctctccactgtcgtcaactgtccgggacagatggatgactctagagttgctgtgttgccgaagcttcggggactttcccagaagcctggctggtttgatatcaaacagacctacacgacggcacttattaaaaacatgccgaattggtcagaggaaaacttacgtcgttgtcgattgctgggtcgggaatatgactgccatagctattcccgactggcggttccatgtcggccataggggcaacgagccgactacctcgaaagctgcgcatcgcggacttctcttcttgcaactggcctagcttgcggagggtggctctgttcttgctaccctttggtttaccggatcgatttgcaaatccatattggcactgtaggccgtgacgcaggcaccgagtacagacactcttgccagacaggttgcatttcaccttggattgcctgcagttttcacacgcggttcggagcttaggtgtatctccgccggcatatgggctgccattggactctgcaagcattgtctgtttggtgctggtggacggggagttggtgtgaaacaggctatcccaatacgatataatgacactacctatagcccggggttcggtgatatatggatatagatggaaagaagggtaacagaggaaagaaaaaaggaaattagagatagaaatctaggatcaacgcgatgataccgcacacgtccaatgaggtagacgcttcacaccctctctacacccacttcttgtatatatataaacaagctcaagcttcagagaagtaatgtcactctggaattcaatccagtaccgacggcagccgcatacagaggtcagccgctgtgaaaccccagatgcttccatctgatcaaccacgcatgggacgccaagtggcaccgttatcccgaggttaaaaggagcatcttccctcattattctcgaatctgattcaacctgatctggcaaaagggaagttcttttgattcacagcgttcgctattttagaacattgcccatgatatgggaaaacagggtcccccaggagaaaccggctagggtccttttgttggccgtcacaccctgatgcaacatcgtaaacgccaatttcggggtcaagtttcttattggagaaccgaatgaaccttttactaacaagggctattggtgtcttgtcgctctggggcctgctctctggaacacaagtacaatagcctcgaatggacaacgctgggcaccatgtgaaatagaagtaaaaaaacatctctttctaatcggctgaccgggtctagtccctgtaagtaaattatgcgctcatcacttcattcctttcttcgtcattgtgtcattgttgcacatactaattcgagtcaccgtcagcagggggaccctttgacactcgagataatttgttgtaagccgcgccacgtacgctacaacgtgaacattccatttcatgctaccttttaaaaacgccatgagcatgttgtccaacctcgaacttgtgttgctccagaccctgactcagccgcgtggaatctgacaggtttcggcagccccgctgtgccgataatcgaatgccttcaacaaccctgtcagatgagctactgctgcgcagaccaccagcacgtggaatatttggtgcgaactccccacaatgtcgaatttcccgggcataagtcgctcaggtacgcgggccgcataaatcgcggctccaaggatatacaagaagccctgaaaaacgacccagttcagaccgacttgccgctgcatgcggtcaattccaaagagaagaaccccatggatcatggggaagacagcagacaagcccatcccaacaaacatggtagcgcggaacggacgccagcgtggggtgcggaaccggggagacgcggatacaatcacgcagcctagcccaatgatactgatcatggcccagtacttgtgctggagatcgggtgtacagtaaaatccgtagaagatactaggcacaaagcttcccacgatgagtcccacgataccgatatagtcgagtgcatttccaatgcgtgcaaccacaggtgaatggtttgagatggtgtgataggttgcggacatgccaagacagaaggcagcccccgcaaagaaacaggaaaaagcgaggatatcagaatcggccgcatcctggtaacgcggagaaagcaactggtagagctggtatgcagcgggggcagccatcagtgctggcaagaggtgggtgtagatattgaccgtctcattgtgaacgtaacccagcgattggaatgaacctaaaaatgaggacgaggcgggccgatatccagaatggatgtgatggttgtcgcgttgccagtgaggtagatcatcccaacgaagaagtcgttttaccaattcgtgagcctcctcgccgacagccgtcatcctcgtagtctgactatctaccgtcactttctgagattcaattgggcgacgttgatgaggcataatcacatgtgatatgcaagtatgcaatgagttacaggaatgttttgaagttgcccaacaaaagaatatgtaagacaagtcagcaaatgaaatccatacaaaaatcaaatcaaggaaaaagcagaaataaatatagacaagataaaaaagaacgagaaatttccaggcgttgggcagttgagggaaatcgtcctgttggggaaaagcctcggaaacaaacaagacaaacaccatgtcaactccacacttgattcatacactatgtcaacacatgtcaacacatggacatggcaaaatgagtcgcttacgcccagtatctgactctctggaaaatgtcggatttgtttcaaagggggacaagaagtgtgtttgacatgcgcactctcccgggtcaagcatgctaacattcgcagactgttggaccataagatccagacgcagtacttcgataatatagtcgatcgatacatgcggttctgtgcccatcactcgaaagacctcgatgcagccttggcctctcttccaacaagtccctccaacgatgcgacttccaatccgcccgcttcccggtcgcccttgaaatcaaaccccgcacagaagcaagtctcgccagcaacagagctatccacactccttctctccctccggaagctgcgcgaagccgttctggcaacagccacaactacaccggcagaattctcacagcgagttcacgtcttctccattcgcttgtctattctcgcgcatcacccaccgtcatacttcccctctctccgatacgttctggataaactgcactccccatctcacccactacccggcgctgaagccaacgaactggttacatacttgattcttgattatgcctgtcggcaaggagatatgattgcggcatacgaactgcgtgctcgggcgcggaaagagcattcctatcagtcgcagacagtggataaggtcttggctgccttgatccacgataattgggtggttttctggcagttacacaacagtgtggattctcatatccgcgcagtgatgaattgggctgcagaccgagttcgcaggcatgcgctcaaggccgtgggcagtgcttatctcagcgtgcatattagctggattttgggcggctgcaccggagacgaacagagttggacatgggagaaattggtcgagaaagagaagctccgctgggagcgggaaggtgataggatcatcattaaacgaccgaagcagaaaacccctcctaagccggagccaagtgcgtcgagtgcataagtcatgggtacatgagtacatgagtacatgtcggactggactttctctggacaagagcatttagtggcgttcttttcattgcatggcgttggttgggaaaacgtcacttcattaccagacggacatcattcacagagtataaattattattagatcgtgcgcagaaaggaattcaatggcccacagggcgaagtgattttcaaattaaagcgttataacttcagatctgagttcggccgatctagatttgtctgcccgatgacaggttgttttgatatcgtatcagctagccgtcccttcatgcgagttgcactgtcgctacaaagctcgtagaccgtcgacaaattgaatatcaaactaccaaacgaatggttggatgtgacctgggcctcgaggagccgacgagactaagaacaatcagtcaacaggttcaaatcaccatttaaacggctaggggtcaaatacctcatccagttgtccagtgtacagaagacacacagccagattttgagctaccagagccccgtccgtccttgtcctatcctccccgagaatacgccactcggccactgcatcggcaaagcgaccatccgacatgcttatcaaaggctttaataaaccagcctctttcgcttcattggcgtcaccaaatacctgacttgctgcgtccagatcaccaatccgcaaaagcaaaagtgccttcctcaactttgtgatgttcgactccggcccaggtacccggaggttatcaagtgatctcctggctgcatcgaaatcacgcatctctatgagtgcattcacgctcctaatcccaagatctgccaatcgctgtttccataattctcgctcagcttcagtagcttcgcttctcatgatctctcggcgcgcttcgaggccgatctcgtacaaaccaccaatgcttcggcgaggatcaccaaatcctatactctggagtctcacggccagtacgcgaagcggccatggaacaatatgacgaggatcttgttcatattcttcgtcattttctgggttataatcagcatcgactggagccgattcaagcttgagatcgatataatagaatgctgaactcaaatcttccagggccttcgattcctgtgctgcgagaactgtattgcccgacagatccaaacaggctagccgcgtgtagaaaagggagaagatgatctttatatccgtcggagatactaaagacgaagtcaaaatcgatgcagagaaatgcgccgcaatgaggaatcgaccctcggccaatagcttttctagggtgcctagagtagtcgacaaaggttcccctgggttgaggattaggaattcggatcgcagtggcagagggatttcaagatgagagagggtatggaagttgctatgccggagtagaaacgagaggtctttttctaaaggttcaggtagatcgtctggcgcaagcgggtctaactcatagaaggatgccccagaaaaggcgttgtcggcagcaagcattgatttgtgtttgacaggcgaggtgggtgtttcggggagagcgagaggactggatcgtgtaagaaaaaggatatagcggtggaaggcgatgtactaactcatccgatgcatctaaaggacctcttgtcgagctgcggggccgagaagctgcataggcaatcagtaagggacagtcggttaggtggtaatgaagtgagcgcttacacttggagatattccgaatgtgcttgcctggtactgaatccatctctacaacctttgaagtatttttgagatcaattagactgaaaagcagagcatgtatgctaatccattgaagtcgaagcaaaacacccgataagctatcggattctgccaggcggtggatgccggatctggcgacttggccgcgatctggcgttgccgaatgcaacaagctgtcagccatacgttccctatcttttcttttctcttttttttatatgatctttgctcggatcttttaccctccttactttattaattgacttgtgggttttcaacaatggcgaccgagaacaagtactcggtcattcttcccacctacaatgagcggaggaacctccctattatcatctggttgatccagaagaccttcaatgaggagtatgcgctcgctctgatatgacccaagagcactggggttaacttgtggttttttaattataggaagctggattgggaggtgattatcgtcgacgatggatcccctgacggcaccctcgagatcgcgaagcagctccagacactctatgggcccgaacacatcatcctcaagccccgtgagggaaagctcggtctgggtacagcttacgtccacggcttgaaatataccaccggcaactttgttatcatcatggacgctgacttcagccaccaccccaagttcatccctgagatgatccgaattcaaaaagagaccgacgccgacattgtgaccggaaccagatatgccaaccggggagatatcaagggtggtgtctacggctgggacttgttccgcaagttcacttcgcgcactgccaacctcatcgcggacgtcatgttgatgcccggtgtgagtgacttgactggaagcttccggctatacaaaaagccagtgctggagaaggttatcctcaaaaccgagagcaagggctacagcttccagatggagatgatggtccgtgctaaggcaatgggctacaaggtgtccgagtgtccgattaccttcgtcgaccgcctgtacggcgagagtaagctgggtggatccgagattgtcgagtacctcaaaggtgtaatgagcttgtgggtgaaggtctaaacgggccataccattggaactttggtgccccaatgcttcgattcatcttcgtctcaaatccaacatggtatcatgcctggacttgcctactgcccgtgctgtgatatacccctttctgacctctgttattctcaacccgtgcacttttgggtggtgtttgaatgacctgtttactgtcggtatcaattcaacgttctcttgccttctggatttcacatttatatgcttcaatatcatcaaccttcagcgctcagagggccttgaggtatcgtagaactcgatcaatgagatcctgctgaccttcggcatgaacattgtggctggcttcaggaacgatcccgctgtttgtatcccatttggcgcctcccgcttcgatggcttgctgccatctccgcaatagcttttccttgtccacccaatgcgggcaatattcatcttctccagaatacaaaaccaatagctttgacgtgataatgccctgcgtacccaccatgccaaaggtctcctgcaaacgcttatcactcaaatccgagctgaagagatcgtcatcagatgggtcgtcggggctatgaggactgactagactcaagaatctccgggcactaagaggcgtgtcggccggataagaaagcttcgcagtcaggttcattgggaggattgagtcgttcttatctgatgtgtatggatgctccttggccgagcgcacaagctgatcgtagacttttctgagctcgtcgggctctggagaagcatcgataatagcttgcagaccctctctatcagaggcaggcgcttgtagaatagcaccatccagcgcagggcggaccaagtgctgaatgccaaaaccaaactccttccgcggcaagggattcggcgaataaaggtagtggagtacgtcctggcttccagtcgaatgccccatgatcgcaatctttccggctgttgtcactgcaccgggttggcgcgacgccttgagatcgcgaacaaaccgcacacattgcccaatttcttctacatcgcgatcaaggcttccgactccccatccggcataggaggacgaaagtagggtagagaagaccgaccagtcggtgtcctctagagcgttagctagcttggacacatagggaacagtggaaaatccatctgtcagtccgcctatgaagataaggctgtttgtcatattgatcccccctgttggtggggtgaactcgaatgccacaagtctgggagcctgcaaatgttagcttgtcatggagaagaatggggcgattattagttacatattcatgtaggaaaccactatgcgatggcccgcgactagcatttgaggacatgatggaagtgtggttggtgataaggttacacttcgtcaagcccgaaggtgtggagggagccagttgacgttatccgattcgtaggccccggggcggctgggcgggccatatttgccctaccttattggtcttctatgatctcatgagcttaaaattcaggtttatgccaatgactttgcgacatacagtttataatgtcaccgagaggacgatctgtctaccaattgtaactaacatttactcctcaactcaaactgaagaatcgaaatcctattctaattttggtcttgaccctgagaagctattcaagattgttccaagcctgttaagccacccttctatgctcggacgactgatagtcctttcccaattccccattgaccgacctgatacttttcaccaacagtagaaaacccgtaaggatcaacggggttcgtataaggctctgataatgtcgtatagtatctgccaatcatggggtcgacacgagcctctcagacgatattccgtttatcaaatagagcagccgaagtcgcttagtttggaaggcttcctgatccgcgatgagaagatagacttcggcaatgaccttgtgcagactactcgcatgattctcaataatcttatcccggctttctatttgttttcaatcaacagggaaatcctacttcgcgctagagatattctccttcaactccttgcagaacaactcaaactatcgggagaggtgtaccgtttctcacttaatgccactgggccagctatctcgtgtaggacctcgcatataagctgctagtcatcgccgaaattgaagagattattgtcgttgaggcatgcccagtctgaggcatctttgaatatctcttcatttttctatgccttcagtgtctcgtcgtcttctaggtcggcactgtagtagaaggacaggcatgctatcggcatgatgaatccactgaactttccgacgaaggtcattgggcctccaatgaggaagaaatttctcgatttctctgttgagagttgagaagtgttagcgagttccaagttgatgatttgcagacataatggaacgtgcgatcaaaaacgttcaacagctagcccggtccttggagagatatttgctgcataatgaaaaaaagggttgggaggaaacaagaagaaaaaagcgaaggtcggagggttatatcgaagggtttagtttaggtacagtgagcggttaaggggtggatgtccaaatttatgggtgaaaagacagccgttcctggcctcaaaagcgatcattttaggtgtcaattctgcaagtggtcattttctagttctacaatgaggtatgtcgtactccgtatgtagcccacgattcgatgggtttaatcggttggtgcctagaatccaaggcaacagaactagccatcttgggactagcgtcaataccttgaccttcgtattgctgaagcttctctatttcctaaatcaaatagcggacgtctcaatacacaatattgcagctgcattgctcagtaaaacgtatattactgagctttggacaatttgacacgctttacgcatgcacatcactggtgtcattggctgtcgtcaacgacgcgacctatctaagcaagatgccttccggccgcaggtctggccgcctcaagggacccagggctctatacgttgatgatccatttaaggcagctgggatcagtgatgatgaggactccgctgagcaggaaattcctggcaaggggaaaaagaagcgcgccccgacagaagattcagcctcagataatgaatttgtcgctgggtcaggcgatgaagccgacgagggaatcgaggaagaagatgagcctgaagagggactagaagaggaattcggatcagaagccgatgcctccgaccccgaagaaatggagctcgacggcatcgaggatactcctcataaagagcgttcgatgtcgtaccaacaagatgcgagtgttaggaagcgaagagccgatggaacagttgtaccatccgccgaagagacacacactcgtggcatcatcgaaccccgagatcacttgtccaaaggcacctattacactctcacattcggttctgacgatcgagatttgatgccagccgtccacttccgaatgcgatggaacaagggtgtagatgcggtttttccatctcgctacacattagaggagacggagaagaagcctgaatatctatacgggcccacgtttggggttcacccagatgatgttctgaaagaaagcacccgcgggtgggactggtattatgatggggacattggtgagaggttccggaaaagacagcgcattgagacgattgaagagtcaatggcgttccaaaattacctacccaaaccagatgcgcgaaaacatggcattttactaggaccccatgataatcaacaactcttcgagctgggctatcatgagtcttttgactttggaaaagcctgggaaagtccaaactccaaaaaagactcatcaggagctgagatcaaaaggattcgagaaggttggatattaaacatcggccacaaggcacattgcatggcttgggctccaaaccaggatggtctgactcagtatcttgctgtggcggcgccgattacagaagatcagaaaagccagtacaaatccgaagatagtgagcctctctcatcgtttcaaccctcggagcctttccctagcgccttacagatttgggagtttaagggcaaaccgagtgaaactcttacgatggctctcgatatggactccaaaccccgccttcggcaagttttgtgtgctgactggggggacctgagacgcatggtatggtgtactttgccccggaccgaacgggtggaggacaaagaagaggaaaaagaatccattggtttacttgcaacagtttggggggatggatatgtgagagttttggatattaaaacaggtagagggtcacaagaaacagaatttcgtgagtgtccctttggagagatttcacgagtcccgctaatgtgcaagatacagtcaaaatcaaatcccctgcgtttgaggcaagaccgccatcaacagtctgcacatgtgtcacttggctatcccctagtgatattgcagtgggctgcggtaacggctttgtggctctctggaacatcgaaccttcctccatgtctgaacctctaccttttttctatcggccactccacgccacctacatactcagtatcacatcggcatacccggtccatccccaattagtcatcacgatttccatggatggcgaaacgaggatgtggtcggtcctcgatccaaccagcgaaatggcatcgacgggccgcatgcgaggagcctctcccttcatcagctattctcccatctgccagtctgttgttgccggggatgaaaacgaattcgctcgcgtaattccaattcgacggttttttaccactaccaccattgcgcggctcagcagcaccatctcggctatggcgcaatgcagttttcatcacccctgtgccctgtttggcagtgccgcaggcgaggtcgtaggaacgaatcccttccgacgagttgtttacaacaaggagcaaatttggcagcagatatggttcacacatgaatggattcctacttctaagacgaacactatgggcacaagtcgatttcatgacggatatcgggcagagaaccagaagttggcaaagtacaagctttttgagaccaaccccatcaatgggatggggacctcgacgatttacgaggaaaatacccacgtcacagccctcgggtggaaccccaaccgcccttgcgcagcctgggccagcgctgcgctggggtgtggattgctgagagtggaagatcttgccatctagtgacggcagccgtattgatcaaacaggcgatctgctagatttactactaatcatgacatgaggacatcatagtcgatctatgaaaagaaactaggtgacagtgaaacaaaatatgccatgttagttgtgtcagagtgggcccccagccacaccaattgcttacttaatgtcgctgtgggaaccccaccacaacatcgtggttggcagatacgccatgtgggttcgatcagatctcagctccacccaatcaaagctcatagaagccaattaaaaataaagtaaaaatataacccatggctggattgccgtcaacccagccaccgtagatccccagccgcctaattttggcccagtagaagtacacttcaccgtgatagtagatccttttcgtataacttttaaacccggacttgagttcttctctttcattctcaattctatcttctatccaaatctcttccaacattgcctatatctccattcaatctcaagcgtctttcccttctcaattattattgcaagcttcaatttctctctgttatcatgcatttctcttctgctgcagtcctcgccctttgctctatcagcgtgacctacgcggcgcccttcgccaatcccgagaatgaagatctcgctcgccgtgcaacctactctgtagtcaatgccgatgaagactgctcttctagcccagtcgcacgcgaagtcgacactgtcttcgaaacctccacagttactgctcctgatgccgacccagtgcccatcactgtgaccgtgactgccacaccttcaagcgtgacctctccctcaaccgctgtggctagccctacttcgtgctgggagacccctaatgttcttccaaccgctggctcttcgtctttcttccgcaggggcctgagagccgctggtcagccggctatctttgctcgcgaatactctagctctttgctttacgcgcgcgagtatcccaccgcctctgcctccgaatctctccatgctcgtggctggtactctgctgcttctggcactccttctattgcgacctctaccgcttcgcctacttccctcgtggctcgcaactttggtgattcgtactcttccgcttgggtcccaacctccagcctggtcactgccactcccctcgttgctcgtggcttgtactcttctgctgctacctcatctgcctcagcgacttcccttgtggctcgtggcttttccccttcttactctagcggaaacatccctctctcccctactcccttcgctgcccgcgacttgtacgcttctccctccggcacattctctatcccgagcatccctacttcagctgctcctctggctgctcgtggcccctatggctggtactcttccgctctcagtgcctcccccattgccacatcttctgcctctccagctatcgtggcccgtggtgcccgcagctggggctcttctagtgcatccagcaccttctctgcgtcggctactcctgtggcctactaagacagaccacatgagacaacggttttaaccttttgcaaatgaacacaagcaaggcttttcatgaagtgatgagatccttgttttatggcacgatatgattgcaacaacgaaaaagaaagattgtgaatgacttgatttatccccattacggctttggggatacatatttgactggcgtttttactggaagggattttgaaataactacaattcttcatgtgtcttttacttatgtggatatgggattgggttgcttttgcgttgggcctacatagactggatttgaatattgatgggtcccgaattacatagaatagttgcacgatgcactggaaataacaaaatgaaatgaatactttgacaattcttttgatatcatacttaattctccgatcaagagccctacataaatattgtcgacaatctcattggaaggctagggcagataaagagcttatgtaacgcggtgcgtggcggctgcacggtggttgccccgagagacgcagcggtaaacatgcatcatccctccgctcaccttcaacttcgaaaccttatgacctccaaggaagggtcttttgtgttcttacatttttttaaattatcaactgttattgtttcttattttttgttccctttgtacctgaattcctacacacttcgattgcatgcgcaagggctggccgagggtcaacatcgataacaatggggacagacgggcctacggtctgcatgtcttgtatgtggcattacactcgtgtaaatttgcactcgctgacaattgttctagttgccaacaatttctggggcaaagatgatgcaggacttcaaccaatgttggaccgcgtgcatgggtcaaagatcacaaacgacgaactgaaggttttttacagcggtacgtgacgttgacgcagccgcaataacatcgaattctaacatcttgttagctcgagccaccatcgaagatgaatacgcacggaaactccaagttctatgtcgaaaggcgctgggatcatgcgagactggatcgctccgagcctcactcgacgttgttcgtggcgagactgaagctatcgctaaggcacacgccgcaattgcaggacaaattaagacggaattggaggagccacttgctgcgtttgccagtggtattaaagagcgacgaaagattattcaacagtgcattgagcgcctacacaagaccaaaatgcaacaaacgcagctcgtcaacaaagtaagtaaagacggggagtgatgagaggtaaaatactaactctatagactcgtgatcgttacgagcaggactgtctccggatcaagggctaccttgctcagggccatatggtcatgggccaggaagagcgcaagaacaaggccaagctagagaagacccagatccagctggcatcaactagccaggaatacgaagcggccgtcaagcagctcgaggagacaactggtcgttggaataaggaatggaagtcagcatgcgacaaatttcaagatttggaagaggagcgtctggacttcacaaaaagcagtctgtggacctacgcaaacattgcttcaactgtttgtgtcagcgacgatgccgtatgtttattgtgcccgggtttattgtgcaatactaattcgacctatagtcatgcgagaaagtccgtctctctttggaagactgtgaagtggagaaggatattatgttcttcatcaaggagcgaggaactggccaagagatcccagatcctccccgattcatcaacttctgcaaggatgatgactcaagctctgacctagatgaagctgatggctactcggtagcccaattccaacgcactatgaaccctgcattccgcacatcttctcctcagccttcaaccttcgaatcacaccatgacccacagtcagagctcgcggctcaaataggacgacctactcttccagccgtgaacaatgcgccgccacctcagcagcaaccgctaccgtcacaacagcagccacccccacagcagcagccgttcatgccacagcagcctctcatgcaacagcagcctcttatgcaacagcagcctctcatgcaacagcagcctctcatgcaacagcagcctctcatgcatcagcagcctcctctgcaaccacaacaacaaccgccgctacaggcacagccccagcaacctgcacctctagacttccgccgtggtggcgcgccgcctccgaactacgaccccgagcaacatggagagatcggagctgttccccacaacgcataccccacagatggtatgaccatgttctgtcgtgccgggccaccctcagaacgaagctcagcgaccagcgcatatcgcccgtctagccaagactctcagagcgaagtttcgaactcaacctctatctctagtgtcgaggaaacacctacgaaaaagtctatagtaaagtcaacaaacagtgtgccgatgacagcttctggagatgacaaatcaccaaaaaagaagagcgctttcttcagcaacagccccttccgtcgcaagagtcgacatgacaaagaaaggcctgttgtttcttcacagcagggcatctctccaacgtcgctcgtttcacccaactccacgtctcgtagtggttgggactcgccgacaaaacaaatcagtccgacgaagcaaatgagcccacccaaacaaatcatcagcccgcccaagcaaatgagcccacctaagcaagtgagcccgcccaagcagattagtgcacccaagcaggctagcccaaccaaacaagtcagccctgtcaggccttcgggaggcctgccgggtcgtgcctctggcagcccggagcctgttgaccctcgagccaacttccagctcaatgtggggaacaatgtctttgacgtggcaaccccagaaaagagctcaccccagaaaggatcacagccgaatcaggcatctgaagatgacttggaccctatcgcgcgggctctagcagacctcaagacgggcggcaagcagtcagccactcgggtgtcggcagatagatatcacggcatctccacacccactccgtcgacatattcttcgacctatggtggcagcagtgttagcgttgctactccgcccccagcatacaatgatcccacagtcaagcgacttggcgcacctcaaccggcctttacagcaaagcaaatgcacaagacaactcagaaatatactggtcaaacccagagcatgcttcgaggacaaaacaacaataatagcatggggtctagacatagtggtcagacccaagacagtatgggatctagacatagcggtcaagaagccacccgagctagatcgccagcaccgagacggagcgtcagccctcagccccgtgtggatactcggatgagccagaacagtggcaggggcccgagccctactccgagtagttaccagtctaacagcatgcgaagtcaatacagccgatcgcccactcctcggcgtactcaagatccgtacactccaaacgagtatgctcggaggccctcgcccgctgcaagccaccgtgctgtatccccgaacccccagttcaggcagcaatctcgtccttctagctctggtggcatggagctgcagttgtctggaaaccacgatatgtacggttccagcagtcccggtggatatgctagctcagctcgaggaggcagccgcccctcatcgagttatggtgaggctcctccgcctgttggccgatctcggagccgtactatggctgttgcagagcctggacgtcaattcagccgtgacggccgcccaatcttgcactttggtaagcatttattcctcctcttcacaatgcgttgttagtatctaaccttagtccaacctcacagctcgtgctatgtactcctacaatgccgccatccctgaagagctcacctttggtaagggagatgtccttgccgttctccgtctgcaggatgacgggtggtgggaagccgaagtcaccaacgcccgtggccaccctggtcttgtgccaagcaattatctgcaaatcatttaataccccattgtactcacgacccgccacgaccctcagaacattcgtcctgaaggtgatgctctttttcttctcacatagataccacgcctttcgtctactttccttgcacattggcgatttctttctggctcagcttctattttgcttttattctcagcatggtgctacagtcccgtcttgacatcactaaacagcttgtttaatcttatcatgtttttgcggatgtttttggacactttagcgtttctgttctgggaatctttttactatgtgcttcatgtgaatttgttgaattcttttttttctgtctttttcctttctcgacagcgatccagcgaaattgtctgaaccctcgacactctatggtcttttatttttattcccgcttcctgccccaatcttcatcatttgcctttctctatgtttgtacgcttttatggaggatatgacgtgctttgctctaattgatgctctcctttctacgatgtatttcccatgacatatgtaagtagtggcctaaattgatttgaagacagtcgtgtatacttgattgatgattgcagtccctcggactggatgcgatagacttttgatttaactcatggtgcaggtacgttccagaggtgctagctttctagtaaatcttatgtctgatgttttaaaagtcattttcgactcaatgccaatgcttttgttatacatatctttcagtctcaccattctatatctttaatctttagtagaaaacatttccgacactcggtatccattatctaacagtatatctcgatcaagtaaataaaggtttacctacttaggggcttgtgagtagctatttcatttagggctgccaatgtgctctggagtgtttcctgttacccctcttcgagactgtcttcaaagcctcatgatctgaccgccttttgacgaaatccagagaaatgttcaattgacttgaatgttcttcagcttctccttcttctgcttcttcccagctataacccaccatgttatcaggtcgcatacgaccgcgtctagtgcgcgtgaccacgtccatcgtacggacacataccaagcgttccttatcaacaaagcacttctctccaaactggaaagcttacattgcgactgccggcttgatcagcacgcccggaatctggtggttgaccgctgcaggggatgatgcaccccgcctcgagtgtccattagcggagcacttggccccggagccgggtccctccaaagaggatatcacacatatgttatcgaaagaggcatactccttccatgtcagaaatattacaggtgtcaccagatacgacggcgcccagttggcgtccaatagcccctgtgaggaccggtttattcatggcgaagtttcttcatcgtggaatgaaaatgatcaatggatgtcctgggctgtttttgatggacattcaggttggcagacagcggacctattgacgaagcaactcctacctttcgtgcgacgcagattgtccgaagttaactcaccggtatcaaatgagtcagtgcagcgcgctatcatggaaggattcgtggacctcgatgattccattatcaagactgcaccggacacatctaagagcaaagaatcattccaagacaaggtcaaaaaactgattcctgcttacgctggttcatgcgctttgttgtctctatacgatcctatcacaagcacgctgcacgttgcatgtactggggattcgagagcggttttaggacaaaaaggagcagacggcaagtgggagacaattcccttgtcagttgaccaaactggcagtaacgaagaagagaccacccgcatttctaaggagcaccctggcgaggaaaacatagccaaagatggacgggttcttggaatcatggtctcaagagcctttggtgacagtctctggaagtggccgttagattttcagaaggaaatgaagcggaaattcaatggtccagcccctctaacaccacggcgtgatattcgcacacctccatacttgactgccgagccggtcgtgacaagtactaagattaatcctaacaaaccttcgttcttgattatggcaacggatgggctatgggattatctctccagtgagcagggtgtcgacttggtagtgaactggttggaaccacaacggacggagaagaatacgaccgaggagaacaagacagatgggaaatttgacttcggcagattctggacagatgtggactggcagtttgagaaggagagaatgacaatccaagatgaaaatgcagcagtacatctgatgcgtaactcccttggtggaaattaccacgagttgatagcaggccggcttgcctttgaccctcctttgtctcgacgggtacgggatgatatcactgtgcaagttgtcttttttaataccgagaagtgaatatcgatttcttggttggtctgaacatagaagtgtacctctaaaaattgtacctccgaaactcttcgggtgacggagaccaaataaagattacgaccatcactgatggatgtatcactcattttctaacaatttccatcataaattcaacaagaagagcctaccgagaatgcctgctatgtctcacctgattatacagatgccacagagtaatggaggcgttgctttgcgtactcgctcagatgattcctcggatgattcttcagatgaatctaccatgtggtgggttctatctggcgttctttggggaaccctcggcggttttataattttggcgacattccattattttagaccatttggttgtgattgtgtacgcaacatttcgcttgtttgggataaaattgctcggtaagtcgtgagcgatgataatatctctttctatcggtgtcgaatccaacagttctcatcaaagaaaagacactaacaggtcctgagatctagtgatgtttgtcgagctggatatcgaatcaaagatggcgtgaaagatgtattccaaaatgcattcaaaagggtatatcacctggctggtctaaaagcagcgcctcaggttatagccaacgaacaacaaactgcaccaggtaaggaagacctatccaaactagatactgtcaagctactgattagtactgtctttgttcagagcccatcgagatgcaagatatcacggtggaatatataagacatgaatctgatagctcggaagatccacccgactacgaatactacgggccacctgaggtgcccctgcctgtctacaaacgttaggagaactagaactaggtccggaagaatggagaggaataagaatgggctaaggataacaggatagtgtttttatattgcttgacttggcttccctgttgtgatattatggcgaatgtgacaccaccatgtggctctctatatgtttagctggtaaataaatagaatcaaaatgtagagagttgaaataagaagagaaaaatagaaaatgtagccattaagcatttaaggtaagaaacactaggtcagtggcattcgagttcttaaatgtccgcttacagtagcttcgatgcggagcgggggcaaggagctaaggggaacgaactattatttgaaaataaaacactgtcgagaataccatgataagtccgcttaagcggccgactattcttgtctctatagtaataaaaaaccagcggtgagctagggaaatctgatacggcgcactagcggttggagactggggtcttactcgcagggaagattagcatataactaatatgacaaccccactaaataggatatcgaccagaacttcttagctttaactcaagcgtctcatcctgctagtcttctttcagtgactgatgggttcctcgtagttcagttactaagatgttatagaaaagatcacgctagcagctggctctgcccacggataatgtacttgtctctatcagcactctttattcctagaggtgtatgccgaagatgaattattatctgaaagaggaccacggtcatcctgacgcaaacctggagttgagtttgtataacctaagacgtgcatttaagcattgactcgatatagaccatcctcacactattctctatcttcataccttcctcacctttactgacatatttacttgccaataatggctcctattcccagcgacaagtctgattcagcatcagaatcaccaattgatttggctgctggatatttaggggtacttatactagcaatgtgtgctctattgttgctcatgcttgtatgcgccatcgtgatccggtatctatgaccaccgagaactaagattgaacatgatgatcttataagaaaggcaaactttacagagaagctgatgctaatattactgtcattctgctagacatcatatattgaatataatcggctgctggatcaagaactgctacatccgagcaaaaacagctctcggcacaacgaggttgaaagcaaaatctttactcagcacaatcacgctgaagaaaactagaacccaaagttatggtgagacctacaccccaaaaaccaactgggtgctatgataatgtctaacctgacatgccgttatcatacagacccgaaaaatacttccgatgtgaggctgcagtacttggtccctccccctaaagcggctcataccaccacaactacaatcgatgattctccttgcagtctgtagacaatgggatttgcacacgattctcaggggaagcaagactctacgggtgaaaggatcgggacatttgaggtgatagattattctagtaaggcaattaccaattaccaatgctgattgctatattcacgtattcatgaagaatcaattcgctaccattggcattttggaaacattgggttgagtgagataagatattcgagatattaaaaattctaaaatttacaaacctggaataagataaacacaaagagaatcattcacaacgaatagcctgccgaagaaccaaagaaagaagctagcaagtattgacagacaggggtatatgaagaaaagacaggcttcgcggtaataattccagcacgtgcaattcccgaaggatcatattcattcatcatcaacaaaggagttagctagacggccaaaaaatgggacttcaaagtggtccagagtatcaactagaatgatatgataagtataagatctatctttcctgccaacgaacagctcagctgtaccggcagctcccgtgaagaaccttggaagactcaccatctcggtaagcatgcatgctaaggaagccgatcaaagcaatatcgataataaacaaaacccaggagagaaagcttgaccagcagaacagtaggtgaatgatctatttggcatgtgagcgtatgcagtattaagagggattggaatacacacaaacatggtagcaaataacatggacgattgccaagcatggaatctacagtagatagtcagcaaaccgggattccaggttattcaaccccttaataaagcctattacataccgcacataatcgctcttatgttcagctagtagtaggaatacaccccccgcgggaggcagaagcagatatgctagtgccgcttcgatatccatgcgaatgggtagacttgtttcaaaggcccctaagctcacatggccaccctcgatgtctcgtccaaatcccgtgttgccatatccgttgctagcaaagtgactgggcgagggtaggtcggtcgaggctcgcggtgagcggaggattggagatattcggtggctgtcggggtggggaggggatagagcgcgctcaagctccggggattgatcttgataaggggcgaagttcatcatgttgtcataccttgaaaggtgaatgacggaatgatcttcgggcatcaggggattaatttggagtagcatctccttatcgttatcagatcgcgacgcgtaactgcccatctgatgcctcaggcgacaatatataaagtaagggtatcatatcattcagtatcttcatagtcaaagatttattatacataaactagcgcagtccatctagactctcccccgaccgcgagcaatcccgctacctcgtgcaatcccgctggctggccgttgggttgttgtcgtagaccctcgtgttgccgtgcggcttgtgctgacactgggcgttcttcctaatccagtagttcgaactgtacccctcgtagttccacgggtgcctcgagtaccccgagtgacctgtgcgcgtcgtttttcgatttcctcggcctttctcgctgctgcttctcgctgctgctgaagtgcctgttcgcgtctttctgccgcttgctgtctttggatcgcttggttctcgatatcgatcacatcctgagtagcgccttgccaatcggggttgaggatcagtcgctgattatgctcagtttgggagagaatgcgagtccacgtgttgaggagtgtcgaggccgacgtaacggtttgtgagaccgtctatacggataattagccaaagtattgaccgtgcattatgagaagaatatattacctccatgttccctttggcggaatccaaacttgccagaagcccttctattacttcgttgatattccgcacaccttgtaattctgtccggagcgcagtctctcgagactgttgatgatcaaagagaggatcctcgccatcatgggaagctcgaggttctagtgtaggtttctcatcggaggttcttgggttgatctttttgcgggtcactctcttggatggtgaattccagaggtcctctgtgtcatcatcagacagctgaagcctctccatttcttctgctgtggtgcggaaagccatgttgaattttcagagcaggagccgaagtatgtacaagcaatctcgatagactgaacacctgaatgggcttagttttgggataactgtgagtccgaaatagttgaaggttaattgacagccgatgatcgacaagactgacagttttaagataatcaaacaagcaattggggtagatcgaaataggaagtcaacattgtttgatgcggggttttcagccaccgcaattatcgggcggtgaagatacccggtggctgggcgacaatcggctttcataacaacttcgtcctcccttcatccccaacttatcgattttagtttcatcgccttggacaattggatatctgcaagatcacgcttcataccttctttagacttttatatctccgggtgcttgcctgattttgaatatctcacaagtcggacgtggtacgcccttgattgaatcaacgctccttttcgatactttatcaaaatcgccaaatccagaaaaagccctgggatagattgtgatatactatttatacttctactcgaaagatcgcaacccttcgaacggttaatcaatcgtgattcaagtcaatatggcgtcaacaccaccgccgccttctccgtctaagcttcgtgtacctagagcaccgcgacatggggcgaagcatgacaactatgaaccttaccctacacgttactctgctagacttgctggtcaacgagcgtcaagggtccaaaccacaccgcccccaagccacccaagcacatctgccaaacatggagcagctaaaaggactctttcgccctcatcacctggcactaccaagccctcgcccaaaaagggtgcacactctcacagaactgctgcctcccgaatttccccctttgattcggaactttcacttccccgcacttctgcacaacacacctcacgttcctctgcagaacgagctttacccacaccagctaaaacaccttcgaagaagaaggtaatcagttctggctcttctacatctcgctctctgtttccttccacatccactcccaaacgcagaaaaatggaaacccccaaatattctgccgcagaatccctggacatcttcgtcgatgagcctttgagagcgtacaacattgaaactgccgagcaagaattgggtatctccattcatgaggactcgcgtgatcgcatccctgtgatcggtccactttcgactgattcgttcgttaccaaggcacgagcggtcggacgacctgctactcgctcaaccaccagccacaaaaatggagcctattttgtccagtaagtcaaacctcatgtacccgtacccaccatattcgcatattctaacttgtaatttaggcgtgggaaaaagatattcaagcgctttgacgacatggaagatgagggcgaggatgaagacgaccttggccttttcgccaaccgccctgacctgttggctgataaccctgatattctcaagagtgtgaagcctttgcgacgtggcgacatcaagcctcgtatcctcttccctgagcccgctgagcctaccgataagcacgctgaccctaccgatggtgcggaggaggatgtcaccgatgtcgaggatcacgagccaacgtctccaactccggcttatgaagaccagacatatctgactcctcccgtcttgccagatctatctaccccctcctttgaatctgagacctcatctgtctatcacactgcccccgttagacgtactggcctccgtttccatcgccctgccgtggacgatgtgacacctttctctttttctgaggacgttagtttcggctcttctaatggggatcaggctcgatcccgaggcctctctgtcagcagtggtagcagcctcctgaagtactggccgtctgtcagcaggaagacgcgggaggccgaggcccgcaccgaccgcaccaagcgtcttcgcgacgcgcgtggtagccctgctccacgcacccgacaggccgcgcgcgcggaagcatccgcggcctcgaccgctgaggcatctacgtctgattcctaggtctccaaggtgtcatctttttttcacgactttgcatcattcagcgctttgggaatttttacttttctttcatttgcgtgcaccggacttggcgcgaagtgcgtgccaatcttttgtttgttggttgcgcctgggagcaaccttttcgtcggctttcttttccttatgccgtcttttctccccacgacagccatcttgtaattgcgcaggccgctgggtttctcttgtctctttgcgttttgttgtttcagtggcgcgcgcgggcttgggagtcgtgaacactaaggatacctcatgagaacatgtattaaattggaatagcggcgtttcctcctgtcttttcatctacgctcttgtttctttctttctttctattgtttctgatggtaccggcgcattcgtttgttgtttcattcatctggaagcggtttattggtcatcacgggaggaatcatagtaaaacgggacagctcaatagaattcaggatatctcgaaacttttcctgtaactcctggtattaagtccctcgcaaaggcatatttctctgtcgagaaagactgccatttggtgtagtcaaaacaaactttcggtagtagccgggtgtacttatccacctggacattgtagacaaggggacaatacaaatacatgaatcgtcacatcgattcactacaggggttgtatctagccttctcctcgacaaatccaacaaaaaggaaatccgcccagtgcagccgggacatgctttttattcgttacagcgttataggtattcctgtccacaaggagaactcctaggtcgattagtgaccagatggatatcgccatttgaatccgtcaaatgaattccaggtcatcgtcatcgtcatcatccaagagtgcctgtttcccattgagcgtggtctcagctggcgcacccaggctctcccggccagcctccctgataccccttgaagtgatgaaccgcgtcttcttaacaccactgccatggggtttgtcatgagcacgcttcattgggcttagacggacattcttggctttgccaaaggtggtcatatccatgccgctggttgtcgtggggctcttgggcaaaggggtgtctgctgctttatctttgttgggactctcgttgctggtccttgcgcgaaggtactcggcgcccacaccaccgacacggccggtaactagcttttgggtgatgtcacgctctcgctgctgggtcgcaagacgtctgcgcattcgttcctccttgctctctatgccgcggcctatcatacccgaagcaagaaaaggatcgtcatacgaatcaatcagatttgccgccgagtctcccatgggattctggaacgaacggccagccccgcggtttctggagggcgccacatagtagagcgattgagaccccatgtcatactgagggccatcgtatctcatgtcttgcttgaaaatagctgctcgcctccttgtttccccaaataatccggtgcgcgagccagatttaccaccgggaccaagcatacccgtatcagcattgactcccgagcgttggccctgggtgcgtcgaacctggatatcaacgtggaagtcacagaactcggtctttcgaccatctatccaggattcgcaggtctttccgtcttttctcacagccttgcagaacccaatatcgcgtgccttaccaatttcgaggaccttgtcatctgatgaggacaaggacaagctgaatctgtttgtgtccagcttgtgctttggtggaggcatgatggtggggttcagaattgcgatgagagtcccttccgagattttgtaataacgggggaaagcagtgtcaaaaaggaagaggtcaatagtccatttcagatcggtcagggtaatggccatatatctgttcgtattgtttagtccatcatcataagggttattttctttagccgacgcgttccccgaagctttcttgtcccttggggcggacttggacgcaacgacgccaaataccacaaagtccccatcgatgtcttctgggagctcgaatgcgggtgccttgacggttttgagtagatcaggaatgcgcaaaactttcgtttctgcgagtgtgcggctcaagaaagaatgtggaagaacgcggcttgatagatgtagcgacgaataggactcgaattttgaagaatccggggccgccttcactaaagcatcgtctgtttggtctaagtcgtgagatgaacttggttcttcttctgccgtatgagttcgcctatgtagatgagattgtctctcgttgtgaccactgccctcggttcgtcgaacattcggagttgtgttactgcgttgtagaccggatgggcgggattgtcccatagatcgaagaatatcctcacgactaaagctttccgtcggccgctcttgtgacaacgacggtggaggggaatgctttgtatccgaagctgcagctttgaaagcctctaactctgacttgtcgacttgaaaagccgaactgcggttggcctgattggcctggaccctttctgctctctctagccgagatttctcagccgccctgccttccgccattctctcgctgaaagattttattcggttgattcctgctgttgatgaaggagaactctggggccgtgaggcgaatatgtcattagagcgaggcgcgacactgtctcgaaatcccatgtgactacttggtcgagggccgggtcttgagcttggaggtcgtttcaaggatacatcattggccttccagcccttatcaatgcccatcacgtacctccgaggcgatattgggtcggtgggaggagcttctcgcctagtaggtgatgccggaacctggattccatcgctgctcgttctttgtttcccccccttggcgattcttggtgttgcaccgcggtcttcttttcgcaaagggcttattgcggagtttggtcgaacatcttcgtcgtccaaattcgaattagaccttccgcgattcttttgctggagtttcttcagctttaagcgcgctttgatctcggctagttgaagctgcagggtttcttcgtcttcttcttccccatcatcttcatccacaatttgactcgcttttgatcggatattgggtgtggttcttgatcgcttcaatggcgataccaggtttcctcgagtgcgttgcatgtcttggtactttcgtcgtccagctggcgaactcaagagagccgcgcggggtgattgaggcggccacacaggttcagccactttttcaggggagagtagttagtcaccgattagtctaatcgattggagggaccgtactggcgatcaatgagaggattcagacgtaatggagaccgaatataccatggagcgtcatttgcggcacgcgccctttacccttgcgcagagtgtagaattcgggatgtaaaatgtgtggaaggtgcagtcacaaggataacagagagctgagagccgaggacagggatacaataacaaggtcaggctgaaactcgctaatgcaaagggaaagtgacggatcgcgcgcacagggctgattggatcgggaaggcgcgttcgccgcgtcgcgcccttgccattttagccccttccgttcccacagatcttctagtcttcaccctcacttccacctattatcacacaatgaggactcgatcagcgccagtgtcaaaatcaaagaagtctgaagacgagacaaatgccaaaaccctcgttgccgcagagaaaccgagcaaaacattcatccttccatcctcaaccagcgacaatgcgcgactcgtctccctaccgaatccccagtcgggagagctaacacgctacttcttctgcccggatcgcggtatatacgaatttacggttgttgcaccaccggcgcatatggcgcggagtatcctgttcacgcctcgcacgcgtgaaacctccaatccactggacgaagagaagaaagaccccgaaccctccgcgcagggttcaatcacaaagaaggcagagttcctggtggcaactccgatcgatgcactgtttttcatggttccattgttagcaccttcctcgaaatcaggccgttctcttttccagccattcgacgatataattgattcccaagacgatatgccaaagcatctgcgccaagtcctttatgatgatgaattcagagactccctcctagcacgggcggaagctatctgtgaagtggtccaggctggtgatgagaagatgttccggttcaatgagacaaggcttgtccaggagttgatcacaaaggcagaacgtatggcggatcggggtcttcctgttagtctggaagaacggtttgttcgtcaggcactagccacgcccttgatgtcggtcaaacgagaagatgttgcgactagccaggagccatcgaacgaaagccaggattcggcctcgaaatccgaggtgagggacaattcaccctcgactgtggctacaactgcgaccccgtctattgggacacctgcaggggagtcgacacctgtgcctcaaccaccgagtgaagagtcgacagcttcggatcacactactcggctcctccgaatttccactgcactagccttcatgaaagaatcatatctgcccgccaccatggcctcgagacttgatgagatcctcgagtctgcagagagccctatcgatttcaagccgctgaaagaccgtctcaaggagattacggaccttcgtgctcaagccctcgcatcacgcgacatgtccaacttcacccggaaacgagcccttgatgatgaggaagaggatatacggggcgagaagaaacgccgcaaggatgaggcggagaaaaaatccaaggctgcagaatcccaagcagttaagaagctgaaaaaggtcaatacgagcgggatgcagaaaatgagctctttcttcgctaaggccgcacctaagaagaagacttgaaggtctctgagacaaaaccaactgaactataacatagccgtatattatacaggtaattcattgccctggcttcggaggaatccaaccagcaagttctaaggttgaaagattatgtctataaatctggaggccagagcctcctgcccagacagagcaacctactgccagtgcaaatgaggtcgagttgagatcctcgcctcgctccgcaatcccaactaatctgcgcgatttcttggaaggcaattacagtggctttctgaaagtcaccgatgcccagacgatttggggtatctttcttcgatccggcgcatctgtgtacagcttcatgtatactatttactaaataatccatgaaagataaatgtgattttatattttggattttggattttggattttggtaccagcgataaccctattcgggtgggctttgcgtcaatctgctatgtaatattcaaagagggatccggtcaatagcagcacccgtaatcctataaccagaaacattagccatcatccagtcactaatgtatgccatcgatcaaggtgtggggaaggaaacaacatacaagaacgacccattggatggcttgctaataaccatagcctcctccaatttctccttgctgatatccgggaacttcttaagataatattcatccctcaacgcagcagtaacagcctccaccttaccctgaggcagcatgtgaacggtgcaaccaccccacccagcaccggtcaagcgactaccccaagtacccgcacgacgcgcaatagcacagatctcatcgacctccggtgcactgcagtcatacgccgtagcacacgattcctgcgactcgttaagcaactgaccgaggtagtgaatgcgcttctcgtctagctgggtagccttggtgaggcaagctttaaaatcaagcacacggcgcgcctccttgaagcagtgcagcgctcgttggcggagcaggaaccgctcggcttgcacagggaatgcggagaggaaggtcgactctagctcggctacggtgatgtccagcagctgcgccatctcctcgcgcgtgtacccctcttcttgtgtgaatacgttcatggtcgtttggatcactgagtcgatttggtactctagtggatcttggacacggccttctttagccattagctcgttgtggaagttgcgcaggctgtagccgagggagctgttgtccttgggtagtgtcacgccgtggtgcttggcgaggatcacggcggcgagggtgcactctgctacgcgcaggttgtagtggcgcggggcagtatcggccttgttggaggttacgaagctctgggccatcaggaaggtgatttcgtcggaggatgtggggattgggacgtgttggacgttgaatctagggaagaattgggtgtagagcaagtagccgcgcttggagaagatagaggctgcttggtccatactgtgattacgcagtgatgttagatttctgtcggcttctgtcgtccgttgataataactcacccgccagaatagacgccaacagcgcgctccgagacaacagccagatccaacaaatcctgcttggagacgttgtggttattggccttcaacacagccagtgcactagcgcacacgaaggcagcactgctggagataccaccaccggggggcacattgccgtcgaccaagatctgcatgctggcagggacgagcgagccatcgggcttctccttgcgcaggaacttgagggcgcccgacaggccggcacggaaataattcacccactcgtgcttcttggggtcgatctcgacatccttatcgtggggcacgctaaactcgcgcgtggggaatttctccggcgagacgttggcgattgtgatggtggtgccctccgcgctggcagtgaccaccttgacagccatgatcacgtcaacgctgacagcagtcggtaggacatcgtacagtgagtagtcgatgtgctcgccgatgatgttcacgcgaccaggactccgcgccacgaaatctgggcggtggttatatgtcttattgaactgggtgatgagattggtccatcttttctggtgctccggtgcaactgaagtcagcgaggcgtcgtctgttgcgtagacttccgcgatggattctgtttgcggcacgagctcctgttggggtggcatggcggggtaagggaaggtcgaaggcggggaagtgaggagagataagaatgggaagaaaaacaaaggaaccgaagatgtaaaaaaggagaagtagtaggagtagagctgaagtagtaatttgtgtgtaattcctcttcaaccagatgtctccatattccccgattccggataaagtggcacgtggggttgcagtagggccatttttgcctttttgagggattccggtggttgcgtgtagctgctttgcggggattgcccccggagtctccattcatcaataactccacgctttctgattggttggttagtttcctctcgcggcggctttctaccggattaggctatgacggcattttctattctatagacatatgttgaatgttccatctctgcttcttgttctggctctttaattgtacctaattcatccctaccgtaatccccttatatccacaacatggccttgctctacgatgtacgtaggcatgttcctggactgcggagtctcgagccgaccgcatgaggtggcggtatcccgaaagtggacctgaagatcggcattgtgccatctaactacggcccgatagaacccgagccttcaaaggataaaaagactatggattcaaaaaaaaaagaaaaggaatggttggaaccctcgactttggcgttattagcaccgcactctaaccaactgagttatggaaccagaccggaacttctgccagtaattgcctactccaataatcatcatacatattaaggactcatggagactcgttttctatttaaaactacgcggattttggggataaaggaaatatcgccgccagaaagagcatcggacgatggcattcttatagctctttagatagtatgtttgaaaatccctcggaatttccgagcacagtctgcggtatatatgttgtgtatagaacctggtatactccgtacatagatggttgggcaaccagtgtatatgttgtacctaaatgtgccaataatagtttgcatgcggggtttcgagctgatcccaagccgatggtattctgtcgtctggttcaactcgatctaattgtatatacccattagttattccaagaatatagagaatttgaatatacctctacgaaataatccaagtcaaggcgcagaataccagtagagaaaatctactccgaaacaacatgataattgttgacttgtttggataggtgatcaggaaaaagaccagcgtagccgagcaaaagacctcggaggctttggtattagcagatcatgaagtaagggatcaataacatcgcatatactatatacaaagggcgcaacaggaataagatccttacaaggtacttcgtaggctccagacgctcgggccgatctagaccctctagaccgaaaagttcgggggatctaaagtcaaagttccggtgagttttgtgtagtaggggcttgactatcgtgactttgaagtccctgtctctggtagacatccactatatgtctaattcattaatgatttgttgggaggtgtacaatagatatgtgtacaccgtacgacagactattgttgccgaggacgtacgggaaaatcaaatcaggtgaccgagccacggccgaggtcggagggcgcgaaggcgcatcaagccaatcagaggccccaaatttcttgactcagagcggtcggacattttgggttaggcgttttctcggaaaccccagagacgagtcactggtaatcttcagcggtcaattggcactcatttttctttactttaaatcactctaccctcagtcttcctggcttggccgtcattcacgatgatgcctttaagaccctcaaaaagtgctctgcgagcattccacctccagaaacagcttgctggacgtcgacctttttctacctcatttgtggcttcggccgcttcgccccaccgctcctctgtccaaaagcgtgctcagagcacagctacggcttcaaatccgtgagtttttttgtgcctcctatgatcaaaatgtaattgcagtttgattctgaactttttaatcgtcagggagtccagacccgtgcccagtccgtcattcaaccaggaaccccatcgcaatgagatttctcccttgcaacaccgccagctccccgagctcgatgactcgtatgttaccctgaggaaattttggacacatgaaaactaattagttggtataaagaatggttggaatgagtggtggcgagatcttccacgagatgatgcttcgccagggtgtgaagcacatctgtgagtacttcatgcttgatattgcacaattggccggttctaatatttgatgtgcagtcggttaccccggtggtgctattctccccgttttcgatgctatctacaactccaagcacttcgatttccttcttcccaagcacgaacagggtgctggtcacatggccgagggttatgcccgtgcctctggcaagcccggtgtcgttctcgttacttctggccctggtgctaccaacgttattactcccatgcaagatgctatgtcagatggtactccgatggttgttttctgtggtcaggtccctaccagcgctattggaaccgattccttccaagaagccgatgtgatcggtatctcccgtgcctgcaccaagtggaacgtgatggtcaagtccgttggtgagctacctcgccgcatccaggaagctttcgagatcgccacgagtggtcgtccaggtcccgtcctggttgacctacccaaggatgtcactgctggcattctccgcaaccctattcccatgcacagcactatcccttcgctccctagcgcagctaccgtggcggcccgtgaaatgagccggaagcagcttgagagcaccatcaaccgtgttgctcacctcgttaacattgccaaaaagcctgtcctctacgttggacagggtctccttgctcgccccgatggccccatgatcctcaaggagtttgccgataaggcatgcattccggtcaccaccaccctgcagggccttggtggatttgacgagttggatcccaaggctctccacatgttgggtatgcacggatccgcttacgccaacatggctatgcaggaggctgatctgatcattgctgttggtgcccgtttcgatgaccgtgtgactctcagcatccccaagtttgcgcctcaagccaagcttgctgctactgaaggccgcggtggtatcgtgcatttcgagatcatgccgaagaacatcaacaaggttgtccaggccaatgaggccgtggagggtgactgtgccgacaacctccgtcttcttttgccccatgtcaaggctgtttccgagcgacctgaatggttcgagcaaatcaacgactggaagaagcgcttccccctgacactctatgaccgtcagaccgaggatggtcctatcaagccccaggctgttatcgagaagcttagcgaactcaccgccgaccggaaggaaaagaccattatcaccactggtgtcggacagcaccagatgtggactgcccagcacttccgctggcgtcaccctcgtaccatgatcacctccggtggtctcggcactatgggcttcggtctccccgccgctcttggagccaaggtggcccgtccggactgcctcgtcatcgatatcgatggtgatgcttctttcaacatgactcttactgagctttccaccgctgctcagttcaacattggtgtcaaggtccttctgatcaacaacgaggagcagggtatggtcactcaatggtaagctgttccctccggtcttcctagtatatctggcttacttttttgttacaggcaaaacctcttctacgaggatcgttactcccacactcaccagcagaaccccgacttcgtcccacttgcaaaggctatgcgcgtcgctgccgacaagtgcttcaaaccctccgaacttgaggagaagttgaagtggctgattgatcacgatggccctgccctcctggaggtcatcactgaccgtaaagtgcccgttcttcctatggtgccttctggccgcggtcttcacgagttcttggtctacgatgaaggtacgcaaacccctggctagtgatttaggaaacagcattaactcatttattacagccaaggatttggagcgcaaggagctgatgcgccagcgtaatgtcgacttccatgtccggaaagagtaggtgactagccaatgtcacctcgacaattcatatttctatactttgatatccatggcgtttcttggctggttcaccaaaagcgattagggcaatatctgtctaaagatgaacaaaaaatttgtcaaccgggttgctcttggaggtctctttggcagagaagtttggtgcacgcgggttctatatacctgttaggcttaacctatcgctatatccttgaaactaccatggtgaattgcatgaacacgtgctccaccatggcctttgatcgatgttggccttctctcttgccatgttgctcctcttgtatataatcatttgacgtctcgggttcctcgatgggacttgggaaattgatatgtttgggttccattaaataggggcagttagtcattgaaagcatttacctcttgtttcattacgcgtcaatgaacacttccttgtatgtttatcatcctagatggcttttatatttgtcacttaaaaatgtacgtagctccagctctggtggtgttctttcataatctaaatgtggaaccaccttcctaaacgggtaataggttggaaagcagagggcaagccatataggaagcaaagtaaactgcatacattctagctattgctttgccttttggcatagtagagcatgtcaataaaacctgcagtcaaaaacgaagagccaaggctggatatgcctaacggatggtaacgaaagaagcctacccacatggcagagcatacttatccaaacaggcgattataccttcgcacctgacacatttgcaaacaatatctctttctttccgtcccattaacacgctcgctttgatcacgttctttcatataccctagggcttgcataccgcacagcaaacgaccattaagagtagcatgttatattcccctcaaccaccttaaccttcacaaatcacaccttcttttgataccaccactctagagacatccattttaaccatcttgttcctatcaagaacctgactagggaatgatactagatcatggactctaagaggtatggtttagatctctcttacttttgcaagatattacaatcgatttgagagatatctgaatatggttcgagaacctcattgctaacccatttaatctataaaaggctgtgccgtgatttcgccaaaggcaattgccgatggaaaaactgcaaatttgttcatgcaagcaatggccaaagtcaaagccacagtccaacaatcccagcaagcccagcaagccaggtccaacgtcctgagccgctgccccaaagatcttgtatcttgccaaatgcagataaggagtttcgagcatggcaaaacagcattcctctacgctcgacggtcactcgtccatcctctgggaagaaaacaactctcttccagaaagcgagggaactgattggatctgacgccagtattcgacaagaagtcatacgaacattggccagtgaggatggcctgcgcctcatcctggaccttgtccaggaaaactttgaagaaatgaatgccgcaaccagagacctgcttttcaagactcaggtgctaccatttctagagacaatcaccaaccccgaggttgcatcctctctagtattggaacaggcagtgggcacaatctacaatgtcttgtttggacttgacggatccagagcagcgcgatggctcaatttcatctgtggcgttctcgagatcgacaccaccaacgaaggcagtgccatgttactggaggcatctctccacacgttctctcgtatcgcggacctgaattctactgctcctgtccaggattgcctgcatgccgttgcccagagatttgaaactgtgttgacctcgatgaatgataagaatggaatgagcggcagactttaccagtctcggatgcaccttgatcgtcttcttcagcgcatggagactggaaactcgctctcaactggtaccacggagaacaaagtcaagaatgaaagcaacgtcgcttttgtcgccaaccgcgagacgcccggcggcagacacaacaatgactttgacgatatctgtcagatcaagatcatgcccacctttgaagaaatctgcagccttcgaggggagtatctgcccgtcaataacccacttcaatggcacattgatggtgtcgacggattgctagatcgaaactttcggttgttgcgagaagacaccgtcggtcaacttcgagatgcaatccaccacgaactaagtccccgtgcgcagagatcgcaattgcgcaggttcgtatatcccaattccattgtggtcaagctcgagttcaattggctttgggggttctacttcgaagtcgacttccctcaacctgctggagtaagaaacttcacacctaaggcccgagagacgtggtggcagaactcgaaacgtctacagcccggggcgcttgtgtgtctaatcgttcaaaaagacgtggttgtgttttgcactgtgacacatcgtgacatgtcaccgaggtacagaaaggataccccctcacaggatcacgtccccccagagaacaaggcaaatccaagaactttatggaagagcgccacgagaggctcagttatgttgatgccagttgattctcggtgcaacaacactcaagtcgttctggaccttttcgactccaaaaaagccaatatgtctctggtggagtttccaggagtcattcttccagcttttgagccggctctcagggcacttcagtcgatgaagagaaccaaaaatctacctttctcggagctgtttgtcccgtggaccttcgacgatttcaacttatttgacatggcccctcccttgtatgctttgcagcctggttttgctttcaatctccgctgcctcatgaagaatgatacgaatttctacgtccgcgttgatcaaccatctaacgtgaaatacgtacaggataattccaccctggatggtgcacaggctcatgcattgatcagctgtttgaaaagaaagctcggtttgattcaagggccacctggtaccggcaagagctacactggtgtggctcttatcaaagtcttactggcaaacaaagacgctgctgctggaggaaacctggggcccatattatgtgtcacatacaccaatcatgctcttgaccagcttcttgaatctttactggacaacaaggttacatcgcaaattgttcgtattggatcacagtccaagtcggagaggttggaaagattcaaccttcacattgttgcgagagatacaccaagaacaaaaatggagaaaaaagaacgatggagtacagctgagatactgtcatattgcgaagaagattttcgcgcgcttgacctgaaaaatgaggtctccattgcgcgtctcaagtcctatatccaacgaacaaaccccagccaacataatcagctgttttcactggtccaagaagatggttctttgagagtacaaaaagacaacccccagaccgcgatcaactcctgggtggattcagcgcctgcaggcagtgctcgtgcacggcctgtggaggaactcaaaaacattaatgtcttcgagatgtctcgagaagaacgacagcttctttacaaccgctggtgtcatgattaccgggcagaagttgaagaaagagttaggcgaatcgtttcctctcacgagattgccaaaaagggatatgatagcgtccaggatgaaatgcaccttcgctgcttggctgaggcagatgtcattggcatcactactgcaggacttgctcgcagattggatatgttccgaagacttcaatgcaagttcatgctgtgcgaagaggctggtgaggttcttgaatctcatattcttactgcgtttctaccttctgttgagcatgcagtcctcatcggcgatcagcaacagcttcgtcctcaagtccagaattacgatctttccagcgagaatcatcgaggtggagcacaatattcactcgatatttccttgtttgagagactggtgagctcaaacaaaagccccatggactgtggagctcctttcagcacattggaaacacagcgtcgaatgcatccgtctatcgctcgtctggtccgtaaaaccttgtatccaagtttgaaggatgctccatccgtttcagagtatccggagattatggggatgcggaaaagactgttctggttggatcaccggcatcaagagggaggatctgacggcgattccatgtcaacctctcactggaatagtcatgagattgatatgaccgttgcactggtcaaccatctggttcaacaaggcgaatacaaacacggagacattgcagtgttgactccgtatctgggccagctccaccgactacgaaaacggttcgatgaactctttgccattatggtagggaaccgtgaccgagttgagctcaaacaggcggggtttgcaggttatgaaaccaaggataagcctacgatcaaagcagccttgtcagaaactcttcgcatggccaccgtggataatttccaaggcgaagaagctaaggttgttgtgatatctctagtccgcagcaacgcaaagaaccaatgcggctttctgcgcacttccaatcggatcaatgtcctgctgtcgcgagcacaacacggcatgtacatcattggcaattcgcagacctcaatccatgttcctatgtgggctcaagttgtgaagattctgagacaagaacacaatatcggaaaggccttggagctccaatgtcctcgccatccagatacaccgattgtggtctcgacaccagaggattttccaaagttctcccccgaaggaggttgcaacctgcgctgtgtcaaccgcctgcgctgtggacatgcctgtatccagaaatgccattcggatgtgcttcacaacgctgtcttttgcctagagccttgccctcgatcgttgggtggctgcaatcacccgtgccccaagcgatgcggggatcgttgtccggaaaagtgcatggtcaacgtataccaaaaggacaggacacttctttgcggccatccaatgccagaccttccttgttggcaggatcaagatatctccaaggttcgctgtctggtgcctgtggacaagacgatcctagggtgcagtcataccacctcactgccgtgccatatcgatgtggaagcacaagactatcgctgcctcgctcaatgccgcagcctccttccttgtggacacttatgcaagaagatttgttaccgctgcatcaccaaaggacctgagagcgtcccagctaatcatggaaattgcgaacaacggtgtgatcgaaatcaatctacatgcgctcatacctgcagcattccttgccacgctgagaagccctgtcctccatgcaaagctccttgcgaggtgcactgcggccattccaagtgcccacgaaaatgctatgagccatgtactccctgcgcggaagaaaaatgtctttcagcgtgtcctcacagcgtctgttcaatgccgtgtgcagccccttgtgaccatgttccatgttccaagcgatgcgagaagaagctcgaatgtgggcaccagtgcccgtcagtgtgtggagaaaaatgtccctcgtcctccttttgccaaacctgcggaaacgaggacatccataatcatcaagtcgatttcatcctgggtgaaacatacagagaaatcaaccttgacgaaaacccatgtgtattccccaagtgtggacatttcctgacaatcgaaaacatggatgcgcaaatggatatggctagctactacgatgtcgacgccagcggcaagcctgtctctatctgcgtatcattggcaccgttctcgattcaagacatcaagacatgcgccacctgtcgtggcccattgcgagatatttcccgatatggtcggctggttcgccgagctatccttgatgagtcaacgaagaaattgatcatcttcctcaatcaggaatatgtccctcttgcacaagaacttccccagcttgtccgtgaattgcatgaatgtgatggccaaagaatgtatccatggccagcggtgattgagatatctggcgcacgaagccatcaaatccagagcatgggcgagatcatcgagagcacaaatccaggtcgatgggatgcaatccttgatctgcgaaagcgtgtcgatctctatcggcaccatgtgaaacccgaagagcaaccctttgaaagagttcggagaatgatcgaaaatgcccgacagcgccaaggcctcacaaccaaccctaagcatgtcgataatgtgctgcagacaaaaggcttcctacaaggcaccgccctcttgatccgcctagacattgctttgattgttgaccttttagatctcggttcccagggacgacctcacttggtcgcacctcgattcgagcttgacctacagaagatgaaggacgattgccagaccctcatccgccacgcggccagtcaccatcgacttctacagcaggcagagggtcatattttcttagcacagctctatgccctggaacgagcacattgcttgactccagagaagaggaacaatatcttgatgcatggccaggcttccattcagaaagccaaaggtctttgcgatgcacacccaggccagacacgaggactggcagatgaagttcatagcgtggagaaaatgttgcgcggaggcacattctacacaattatcaccaacgaggaacgcatgtcagtcctttcggcgatggctcaagagttcaggggaactggacattggtactattgtcgcaacggacatccgtttaccattggagactgtgggttggctcgggagataagtcgctgtcccgagtgtgatgccccggtgggaggtgagagttcggaattggcagatggagtgagactggcggtggactgggatctggacagggagagattgaatctgtagggggagatgggttgattctgttgctctttgcgctgctcattctttgtgtgcatcctttgtgattaggcaactcaatttgcgtgccgtacagcaggtagtcaggacacattgaaattttctactttgactgtttggagactataaatatataagtaaaagctttgaagcttaaaaccgtgaaggtttaaaaatgaaagctctggcgatgtaagaggtggaatgttatgagcagccgctatcggctgccgtaagaagttcacgggtgacgtctcggggagtctcaaggtgacacgcctaagcttatcctgcactcacctccttccgctttccctcccccattattcccaccttggtactttttttatgaattgattcgcatgcactctcgctagctcattgtctttggcattgcatgtgttcaccctgctctccccacagtttccacccctcacccgttccatgatggctagcccaccacccgtcaccgaggaccagaaccgcccccccccggggggatttgggggggggggggnnnnnnnnnnnnnnnnnnnnnnnnnnnnnnnnnnnnnnnnnnnnnnnnnnnnnnnnnnnnnnnnnnnnnnnnnnnnnnnnnnnnnnnnnnnnnnnnnnnnnnnnnnnnnnnnnnnnnnnnnnnnnnnnnnnnnnnnnnnnnnnnnnnnnnnnnnnnnnnnnnnnnnnnnnnnnnnnnnnnnnnnnnnnnnnnnnnnnnnnnnnnnnnnnnnnnnnnnnnnnnnnnnnnnnnnnnnnnnnnnnnnnnnnnnnnnnnnnnnnnnnnnnnnnnnnnnnnnnnnnnnnnnnnnnnnnnnnnnnnnnnnnnnnnnnnnnnnnnngagcccgcctcctcgaggaggcattgggggtggtgaggcagcagtcgagtctgatgcgcaaatgcctagagactcctggaaagctcatggatgcgctcaaatgcgggtgagctcccccatgaaactccccaggcagcgacctcggaacgtgcgcaatgggttcgtatgctaaccgcttgaaatcaacttctacagatcgactcttgtttccgaattacgaacccccagtctcggtccgaaacagtattacgaattgtatatggccgtttttgatgctctgcgacacctttccgtctacctaaaggagaaccaccccgtcaaccatcttgccgacctgtacgagctcgttcagtatgccggcaatatcgtcccccgcttgtacttgatgatcaccgtaggtactgtttacatgtccgtcgaagatgcgccggtcaaggagatcatgaaggatatgatggaaatgagccgaggcgtccagcacccgatccgtggcctgttcttacgatactacctctctggccaagcacgggatcatttgcccctgggaagtggtgatggcccagagggtaacatgcaggattcgatcaactttgttttgacgaattttgtggaaatgaacaagctctgggttcggcttcagcaccagggcccctcacgagagcgggataggcgcatacaagaacgacgtgaactggagctgcttgttggtagcaacatcgttcgactcagtcagttggttgatcttgaggggtacaagtccggtattttgcaagcgcttttagaacaagtcgtacaatgccgagatgttctcgcgcaagaatatctcctggaaggtacggctcctttttttttttggaagatactcttgcttggtccatttgctaatttgatcaacagttatcacgaaggtcttcccagatgagtttcacctgcacaccctagaccttctattgtcttccatcgccagacttaacccaaacgtggatctgaagaaaatcgtcattggtcttatggaccgcttgtcttcttatgccgcaagggaagcggactcggcagtggagccagaagtacgaaaaaaaagcgaggaagaagctgtcgccaagctattgcaaaagctcgagcttgccaaagaaaccaaagccgaggagtcgaaggaaaccagcatcagcacgagcaccgatgaaacttccaaggaaaatggtaccgagaatggcgaagcagaagcacccagcgaaagccctgagcctgctgaacctccaacggaagaaaaccaggttgagtgtggggatgatgctaagcctggtattccagcagaaatcaagctgtacgatatcttctacgaccaagtggttaatttgatccgaacgcgtgcattgccgattcaagataccatggcgctgttggtatcacttgtcaatttggcattgaatacctatccagatcggttagagtacgttgaccaggtcctggactttgcgacgcaaaaaactgccgaatacaccgatcatgccgatttgcattccgcaccaacccaacaacacatcctccaccttctcaatgctcctcttaaatcatacatttcgatcttcacagccttggccttgccacattacctgccactactggcctcacagtcgtaccccacaaggagggctgttgcgggcgaggtgattcgcagtcttttgaggaacaagatcttgatatccacaccggaaaacctcgaccgtgtgctccaggcggtaagagtattgatcaaggaaggcatgcagcagtctgctggataccccgggtcacagtctcagcggcggggaggagaaaccgatgaaacggtagaagagcaagggtggcttgcgagactcgtacacttgattcaagcatcggataatgacacccagctaaaggtaagatcacttgccagatgtgttacacctataactaacagtctgtggcagcttctccaagcaacgcgcaaggcattggccgatggtaatgaacgaatccgctataccactcccgcgatcataacggcctcggtccgattggcccgcaaattgaagtcgcgcgagcattacgacgacaattggcaatcacagtcgtcggctctataccgattcatgcaccagagcatcaacaatttgtaccagcgcgtcaatccaggttgcgctgatctctcactgcgactgtttgtcatgtgtggcgagattgccgatcaaaccggatttgaggaagttagctacgagttctttgcgcaggcattcaccatctatgaagatgctattagtgactcacgcgcccagttccaggccgtctgcattatttcgggcgccctacatgggagtcgtggattctccaaggagaactatgacacactcattaccaaagctgcgctacacggaagcaaactcctcaagaagcctgatcaatgtcgtgcggtgtatctcgcaagccacctttggtgggtagttgagaaccctcaacgcgaagaagatgagcctaagggtgtaagttttatttccaactcgaattacaatatcttagtatctttcagctgacatcaattttacagctctaccgcgacggcaaacgagtcctcgagtgcctccagcgcgccctccgtgttgccgatgcgtgcatggacaccgctgtctccgtcgagctctttgtggagatcctcaaccgctatgtctactatttcgaccagcagaacgagaccgtcactaccaagtacttgaacggtctcattgaactaattcactccaacctgcagaccaacgaagacgagcaaaatactaaccttgacggcccgaagcgccacttctatcgcacgctggagtatatccgctctcgcgaatacgaaggcattgtgacagatccaccgaagtaattgccaaatggatttccagaccattttggtcaagatgcaccccccggtcatcttctagaagcactgtatgtcattgatacgtgggattcctgctttgatcctcctggaaagacttttttgtttgctcgacttcatttccttggtcatttttttgtctttctcttgttcctggaagcctgcctctttttctcttgctgctcctcggatttctttcattcctagtatatacaagtgtatcattgtctccggataacaccatacccttttcagcatgatttgtattggccatggacaacatcttttttgcctttttgtagtacaaacacgcaccagtgtagctccgtgaagttgatcaatcataatgaatatgactgaccatacctatatacctatatattcatgcgaggagccgtaccaaatttcttccggaaaatatatatccaaaaacctacccaagatgtttttttacgttgctatgttctacgcaaaaagccaacaaacgaaagccgaagaaaccttcgatcatgcaattggtcaaggacgatgacggagtgggggattaaccctatctccacggatatcgctgcataatgtagaaaggccagagactcataccgtacatgaaacaaatccggatgccgtacttcgaaaagtaaggcattcaagcattggaaaaacaccaagcaaataaacaacccatatcaatagcagtgactccttcggttagaaagatgtagacagatgtgtgattatgacgtgaatccatgacgcttcagtaaaaagggacgagaaaaaaaagaaatgaaaaagaaatagatgagggcatttcaaagtcgttccaacaagagtgcgaaaaaggaggccaagaagaatactcaaggcggattagcatcaaatcatgatcaggatagagaagtcccgaataagccagtcggaggcgaagcatactgccgcagcacagagggcccaccaaatccgccgaagggggctgggtggctgttactggggatcgggctgccgatatccccaggcacaatgctgccccgatgaccggagaccgcgctgttgggatcgggctcgaatcggacagactggccattcgggccttccttgatagaaaacgatccgccgccattctgggcactaccttccgtatcgcagatgtccagcatttcatccaaagagatcgatggctcgcctgagttgcgcaattgctccacctgaccgagaacaaggttcacatcgtggaagcttccagtaccgttctgcgggctggtcatcgtgtttaactgcttgcatgcttggatgaccaacaggcgaattgtaacgggccgagaagtgtgggaccgatgatgaacacccgctgcgaaggcattattaggaggccagccagttccagcaggggcgggtccccatgcggaagggaatggggagcccgcaaagggcgccgcactccatgtagtgttacccattggagaaccaaccgcgaagtgattttgtggggtacccagaggatccgagaacaaggacgatccttggaagctcgctcgcgttggccccggaaatgccccaggtgcgggggcaccaggcaatgattgagacaggtttgacggatatgtagcatcagtgtcatccagaagcgcactgctacctagatgagcactcaagccatccacttcccgttgcactgaagcattgccattgttctgccgatcctgtgcggagctggatgggcgtttgatagggcttggccgtgtgatggggaatggctgggtcccagactctaacggggagcggtcaaatgaaagggagggctgcctggaatgggcttttgacagaccggcttgctgcaaggggaaggccccaggcactccatggttgccagcgaagctaaggccatgtccagaatcgggtgggaacgctcggctcggcggcatggggcgtacaccgttcattccaggcggcgcaggaattccaccagatccattgaatgatcgcaaagggttcatcatgcccgcattcgacgaatacattgattctgaagggtgattcgatcgcgcagccattcctggtatgccggggggattgaacggcagacctccgaggccagcgaatgctgaaggatttgcgcgccctagaggtgacagaggggcagaaggctgcggatggtgcaaaggaggctgttgatagccttgtctggcaccgaaagacgctcctgactgcggaggacccatggaacgtggggaaatggaagaagggtgatgagaggaatcggcgctgttaggttgagagtgaggagaggatgtagaagagccatgatgagattgttgacgaggtcttgccggagtcgagaccttgggaacaataggtgtcgccataggataatgcggagactgcaggaaaccaggaggagcctgagactggatattgtatgggatgacgcctggcagagtgtgtggtggcgaggttctgatttgttcgcgctttccactccgatctcgaatttcctgctctcgtgctgcgtctcggtccttcctcgcctgctcttcacgcattttgcgctcacgctcctcttctctggttttcttttccagggcctcacgctcttccttctctttgcgtttggcttcctctcgtctcttcttctcctctttttgttctcgttgcttacgctcagcttcagcttgacgttcccgttcttctttgagtcgtcgctgcttctcggcttctttgcgagcacgctcttcctcttgtgcctttctttcggcatcacgtttcttccgttgctcttcgcgcttcaatcgctgttcttcgagtttcttatcttgcgcagccttcagagccgcctcttcggccgctttctccgcatctcggcgggccttctcctcttcttttgcttgtctttgcaaacgcttcttatctttcttcttttgcgcttcccgggcctttttagcattgcgctgttcgttcagcgtctcctcttggagtagctcatcgattagctgtttctggcgctgttcggcaaccttctctcgatatgccgtcatgactcgttgctcaaacattcgggcggcgaaaatctggaacatccgtcgcccttcctgcatgcgttgttcctcggtcatggcatcctgttaccgttattagcaaattggctcgagcaatatgagatcgtagacccgtaccatttcgtcttcgtcgaactcttcctcctcttgactatcatagtcctcatcgtcctcttcatcatcgtaatcctcatcatccaaaggaccgtgattatgcccatggaaggactgatgagcagcagctattccgtactgtgtatcttcctctctttgcattctccgttcagccaattgctccatcatatcgatgaagtgcttgccatcgtttttcagaagatcgtccgcaactgtaagaattccatctgataagaaaataattagtatccaaagttagaggtcgatctctcataatatcaatcaagtgatcttgttgcataccctttacagttagactgttgccaaatgcaaaaaaatcggcgcgggccgctcgagcttcatcatcctcaaggtcctcgtcgctgtacagctcctcatcatcgtcttcctcgtcctcgtcgtcttcttcatcatcctcttcctcttcttcgtcgtagtcctcttccaaatcatcattgttgtcttcaggtagctcctggacccggctccgtgacggatgaaactggccatgcgttctagtatgctgccctggggaccgaagaggtggttgatagagtcgagggggaggaatgatgggagctccttcgtcaaatgcgccttggttgttattcgcatattgttccagctcctcatagtatgcatcgtagaggacctccagctcttcttcaatcgcggttcgttttcttccacaaactgtacaactgcaagagtgcttttgctgttctttcattttcttcaaaacagcgtccttttccaccttgacaagctggcggcgttcttcttcgccgagctcaaaccaaaaggtcctgatattttcgcgttcttcgagagtagactggttccagatgctactatttttaataggctttccggtgaatcgactgatgtatggcatggattgaggcggaggagggtgggcgaaagtcgcggacggggtagaaagcggagttgagctacgctcagcatgattctgagattcggatcgtgctttccgagttttcttcctcttcgatgtctcacccaaggtagcgtggtggccatcggatccgttcattgtgggagatccgcgcggatgttctggtgacacatatccgtaatgaccggtgcttgctgtatggttgcgatcatcggggtaatagtcgtggtcttcatcgtaggagcgctgttcatctgttgctagcaagtccgcatctccggaggcataagcatcaggatgttccgcggctaagcgagcagcttgtttctggcgacgtttctgttttttgcgattcacagaaggcgcagaggtcacggctgatccggtcgatgtgttgccctgaggaccccgcgcgtgggtctcgccgttggttgctggaagaggagttgctgacatatgggtcgccatggtagaggtgaaataagctgcaaggactgcctcagcagcatactaataccaccagagcaagctttgagttagaaaataaggtcagagagtttggggtggtagaatggggaggaaaagcggagaacggaagagccaaagagccctaccaacaaagctccggtgattccacgatctggggttcacttaccggaattattccccttggcgtatccacgcacaaagagtaaagcgcgttctttgttgttttctgaaaatacacttccgcagtgacaaacgtgaggggtgagataggataagaacacgggagggggggtgaaaggcacggcgggtcacgacgtgtctgcgcggattagctgctggagcgcaagtaaaccagcggaggaaaacaaacaatgagtcaaagctatgattgacaaccttgggagatattaatgctgagtgagcgccgaggcaagaggtacgagagatcaaacgatgaatggatggagtgatgggctttctagccttctggctggttgtcgtgccgccgcaacgggatagccgctgcaagcgagctgatgcctgaattgtcaggttgcaatctcgaattgtatgtttgagtaacgggatcgtgcttgaaagaagatatttcaaactttccactggtagcaaagttcagagatcaactgggtcaactcttcagccaagcgatcatgccttggttacaaggttaaacagaagtcacgtctcactgctctcatactgatcactatatggtgagtcacatgataaaatctggtgtccgccttcaatctgcccgcaatatccctccacaccatggcggtgaagatgtaaatagcaaggggaaacaagtatgagcgctcgatccaccgagctgtgtgagacacggagagcgctaattaaaaatatctgccaaggtgataaacaagagagggacaaaaaaagggtccctatagggtgctgaaaccgaaaagatacccatcttttctattaatatttatgtagtcccttcatagtctcggcgtgagccttaaatctccgcttaagaggaattgtaacttccccttcatcttatcttgctcttcagcttcgacctctttcttttcaaaaaaaaaaacttccgctcactcaatttctgcccttctcctctctctttaagccccctatcatttcgaggtgacatcgcctaggcattctcgtgtctacgtcaaacccccccaatcattagcctcagccgcagcgcgaccttttccccctccccaacaatttgtcacgtcactgtttgggtgcatcttcaggccacccattcatctgctctctgtaatccctttgggcactatctgcctcgagctggtctttccttactatccatctcgccaattctcgtaatcagctgaatccgactcggaactccgcgtcatctcgctgatccacaacaccctccgctctcccattacccttgtgtatcacgaaagggttttgcaaccttcataatgtcgcaacagcaggatgataatgtgatgcgaaggtatgtgtagcccatttttaaggtggtgtcttacatccccgctgtatcgcaaggagattatgcaagccgattggaggcggccgcctagcatttcctataccattgccagtgggatggaaggcagaatagtgttcgcatatgctgacttgacgtcttactaggaagcttgtcatcattggagatggtgcatgtggaaaaaccagtttgctcagcgtctttaccctcgggtacttcccaactgtgagtttggtcctcaggcccttataagcaaggtccgtgactaatatgttcttatatgacagcattatgttagtactctcgaattcgatacattccaccccgatcacatgtctgacctctcccccgttaggtaccaacggtattcgaaaactacgtgacggattgccgtgtcgatggccgctcagttcaattggctctgtgggatacggcaggacaagaagattatgaacgcttgcgaccattagcctactcaaaagcccatgtcctcttgattgggttctctgtggatactcctgattcgttggagaatgtgaaacacaaggttcgtctcagattaattgaggaatcggtagtcatactgattttcggtatagtggatcgacgaagcaaacgagcgatgccccggagtaccgattcttttggttggattgaagaaagaccttcgtgaagacccattggcgattgaagaaatgcgcaagaaatcactcaagttcgtgacaacaaaagagggcagtgatatcgcaacgtcgattggagcccgcaaatatcttgaatgctcgtctttgacaggcgagggtgttgatgatgtattcgaagcagctacccgtgctgcattgctcacgttcgacaaacggaaatcgtcttgctgtgtggttatctgatgatgcaatttgggatgtctttctctgccagcgctcggtttttctgttgacttggaacttgattgatacaacttggtgtaaaccatgaagatatcaatcagtactccgttgtatcatgcatcactggtgtttgggaggttcttgtgttcacccagtcgattgatctgggtacgatgtctgctttccggttattttcagccgtgccttttccttgcaggtattttcttacgtctttcctttttgatcaattgtgtatttgtggctgatgcttatgcacgtgcaactccggattcccctccttctcatcgttcaattccccgaagtacattgcgatcccgctcattgtgttctctttttttatgtagtaattccggtccctttgctttcagcgctgatttctcatacattgtgctcacggcccgctcagggtaccatataatcaatttatctcctttctccctatactccttgatatagagtccgagcatatcgcacagaaaaaccataggataactcaagcaaagtctcgtagagcttgaaacgcaaaatgcatagtatatcaagataaaaaaggaaaagcatatgttacatagcgccaaaatgatacatatatcttgggccctccagtcaaatcaacatcaaatccaaccagacaacctctcctcaagacctctacttccttacaggcttcttccagtcatagttccatccatcagaaggtggagaatcggtctgcatgcgagcatactcaatagggaacatatcagtgaagatacccttcttgttcatggagacgcggaacagctttcctccgtcacccgcaccggtgcgcagctcctcgcacgcatcctgcatgctctggtactggcgcatcatctcgagttcgtgcttgcggcgctgctgagcctggaacaattgccacgcgcggtggatggtccagtgtcggaggtaacggttgcgggagaagcggaggggacggggagtgagaggatggtggaggaagtagcggatgagagctagagggttgaaaatggattgttagttttgagttctttttcttttggttggccgtgacgtgtttggtctggttgaggggctttcgggactcgggactcgggtaagagctcggcgcagggacgtgacacatactaatgcgcttatcaactacagagccgccggaggcctttctagcggccattgcgcttgttgtcgagaatggcgctgattgcagggctgctgtgactgggccgggctgttgtggttggcggttcagggtctcgtggcatgcccgggtgattgatgggcggaccggcgccatcgacattgggatcttgaagacattcgcgagggacgcgagggctggtgataaggacctcattctgatggttgtttgttgggtggaaggagtgggaaggactcgatgtaattgagttcgacggggaataattccttgacggcagaatcttgtccgccgatttagccgcgcgcttaacattcccgctacctctttagctgcaacgcatttgtgcttcatataggcatgctcttcttaaataatgatttgatttacttattgaatggctaggaatctaatttgcacaagaaagggttctacgtccgataactggtcaattaagccggtcttgataataataataggtacagatagaaatcgatacttttgagcagagatcatgacttgatatttttgtcgaataataagatagagatattcagcagtatcgagagtcatcaaaggcatcatatgtgaaatgtcccaccaaagccatcaaatagaataccataaacgccatagaatgcagtcgacgcgcgcgccgaagaaagcagaggaagtagggactcaaaatcgagaaatgggctattcaaagctatcaagtggaccgctttgcagcatggtgtttcttagctcgatcgtagttcaaaaccttgcggcgacggtgcgtttgggcgagcttccatcgacaataaagaaccagtgcatccttcaacagaacaaacatgcacccaccaacaacgctgcgaccccagcgggtctggagtagccccaggcggccaccgctcatggttggggatgtccatgacttaggtagaagacacttcaataggccacccactgatgctgagactgctgggaagacgagtgctccgagtacgacatcagcgaaattgctggtatcggcgatgatctcattatgtcggtgcccaagccctagcgggttattgttttgcgcagcatcttgtgggccgtcatcggcatcttcgtcctgctcgacggcagccccaaggtccggttcgtctccatcgcccattcccatttgcagctcaagatcgatctccatcaggatttgtccgttcccattatcaccaaaccggttgagaccctccgcctgatcttgttgctgcgcatcatccaggacttcttctgccgcgcggggttgtacctcggcaatccatttccgttccaagccaccgaatatccgttcgtaaagcgccccgtaaaagctgttgacgtatggcagcgcggcaaacgtcatagccggcgtgggtggccacaagtcaaagtccgggtcctgcccggggttatgtgaagcgaagaaaagaaccggaatagctggaagaaggccttcggcgtatcgagtgcgcgagaatattagaacgagcgggattagcggcaatccaacattcatcccgggattccacgggccctccacagtctcctccatgatctgcctggcttcctcggttccgaaaatgaggtacattgaataaacgccatgcgcgcagcacccggcccaaacagtgccagccattgtaaacattatgccgggaagaaccaatcgacctgctacgcgctcgaataatcgaagtacatcgacgacatagcttcgcgggcgagtgaccacgatttccgtcttgcactgagggcacatcattgttacaccaccgttgcttttccgcgaccgggggttttccatgtccgctagccagtcgagcaggcatgcctcgtgggctgtcaaggcacaagggcagggcgaccgccattccagattcagtggcgagtcttccgtttcatctgtgtagcaaatccagcatttgcgcggctcgtcttcctctgagacatgggggggttttgatgatgaactaagtttgctggaaatatccgattcgtggctcgaggtcgatacgctcttattcaagaaaacggtttcggtgtcctccatcgactcatcctgaggtgagacactctcttgagagatggtagtttcatcgggattggcgggggtggtatcatcgggtggtctgattctgcctggtgcagagtatcccgggacggacgccatcgtagtggggactagctatgcaagtcagggccgatgagagaagtagagagatagttgcggtaatgatctaaatcgggctcgataagagataaagaacggagttcagcatcttctgagtagagaggtgaaacatataaaagccgaaaagcaaataaatgtcttaatttgccccagagcacaagaagagagggagccccattccacttaagtggaggttggaatctcttaagttcggctgtaagccgcggctgtcaaaggcggtcacgtgggggcaatcacgtcacagacccaagctcaaaccggaaatggcaaatgatcgtcgggcgtatagatgtagatttactttctaattcacttttgagtatatatgatatactaccgttcagtgagatacaatagttcgaccattgctcttagtcctcctatattacttccttccaggttaatgacagcgctcagctctctgtgtcctaatcgtcgtcctgtgttctgaggccgtggtggacatggtgatggtgatagtagtgtttttcctggtctagttgaccgaagagcagaactagctaggcactaaattggactttggggcatgttgcagttttaatacacacccatagatatctgtgttgtgtttgcccctgcatggcaagcccatatacgaggatattgaaaagttaacctttgatttggtcgaatatggaatactactccacacagctgtctacatagaccgatggataagaaatttgaatttgaataaagtagcaaatcatcattaaaaaagcagaaagtaataaggcttgatctggcgatctggtgatcaggggtggaaaagcaacatcatagaagagcgaggggtagctaatccacacacccaactaactacagttcagggtgaatgctaccgtcagactccctctttccgtcagctgatgcagccatttcttccagggcatcatccagattagttgggactgagacagattcaggcgaccccgcgggaacagctgcaggttcagcggactttgtcacgtccatgtcgtccttgccctcctgcttatctgccgattcggttgctatgggagacgatccagccgatttcgaggtctctgctggggtctgtatagggtagacatccgctgttgtggtcctgggcgaggtcatgtcctctaaaaccggagattcaggtgttgggtctacagattcaccggcggtattcttggcaattggaggggccattgggcgttcagcagtcaccgacggttccttcactgcaacggcagacttctcttccttcttactggttccaacaacaacctttccatcctggtcgacctgccagatattcaaagcttctgtgatcttgatctctgggatagtggggagcgtgggactggttttctcgacggctggcttgcgtcgtgctggtccacgggctcttcccttacgagcatcgctgagaggctgcttctcaaccggcacctcgggctccttttcctgaggctttggctgctgcggacccagctgcagacgtgaattcagatcagtgaggaagcccgccttcatggctgcaattttgctcccgcctggacgaccaggaattgcgggcttggccttaactgcaggagcatctttcgaggcttcagcggtggttcctgcggcctgggaactgggcttagcaggacgggtagggacctgaggcttgggtctgcctggaattgatggtggttggcgcttttcggtcggtgaggtagactgaggctgtctctgcgggcgcgggggaattccaggcctggaaggtacttccggacttttcaattcttcttttgcaggctcaattgtggtcaccagctgttgactatcaggggcatcttcccaaatatctctactggggaaacgctgtttcaaagtgtcgggtcgcgcgggagtcttatccctgccgttctcgccttccaggatgagggcggccacccgatgagagtcgactttggcgttctgcatcttgcgtttggcctcttgctcgggtgtttcgaagacttcggcagagtctcgcttaggcagatctggggtggtgacggtggcctgaagctgcagactgttcggggtatcctcccagatatcctggctagggaatctgtgcttgagtgtgtcaggccttttcttgaagcgatccgcagctgacacgggtttccctttcttagcatcctcttcagggaacaacggttcatactcctcgacgtcttcaagaggtgtatacgtatcctcgcgcgagtcaaagcgggttagttggccttgcacacttgccgaccgactgttggaacgactgttggaacgactgtgggaactaggggttcgactgcggccatcatcctcgaagcttggtcgacgatcaaatgacggcgagacggcgggatgcaagtacgccgactcggggcgcacttcatcagcagccaaaattggctcatcgtcctccacggcgttctcatatgtcggctcattctcttccagcgccggggtggcggcgaatccatccggatggtgcaaaggatgcatcggatcatccacgtggatcacgccaccatcacgatgaccatgcgaactggatctacgttgatgcagtggccttgcggtagtttgcttctgcgttgcttctgaagggaaactcatctgtcgaagtggcgactcaacagtcggttggctttcgaatcgaccgtcgggagggggagaagcaatttgctgtatgtactcgtcggacgctatatatccgacctcttcttcgggggtacccacgatggatggggaagtacctagctacagttagctttcaatcggcagcacaattgcttcaaatactcaccaagaccggaaccagtctgggccgagcttcgaacaatcttgttcagatcatcgctgctcattgcccaatcgggacgcggagtgccgacaccagggccatattttccttcttccttcacgaattcatcgggatgcttttcataccaagccttctcaaacttatcgggatgctgaacaccatgtccatgcaatccatagctaccagggggcagtgaagagtcccgagcactacgagtgcggttgtggttacggctggaccgctgcgagccttgttcgaggtacgggctgggggatggtgcctggacgtcaccggcatttggatacatgggcacgcggaacccctgctcatctcccatgtgggcagagtgtcggcgctcattggatgcagttgatccggtgcgtgaaccactcgttcgggaatgcagtgaacgacttgaacgttctagttcctcgcgagcaggcgaaacaccacggcctagtcctgccgcagcagcctggcgggaatcagtccgggtgacacctcggactcttgcttccgcacttgatatcggcaacgaaggtctcggtgcatggatcttaagatcactgccaacattgcgagtctccgcaggtgtctggtgatgggtatccgacatgtttcctgggtcgagatccgcatattcaataccctcctcgccgagggacggtatcgtgacgctgggaggacgtggaggcaaatcatttgaaacggtgcgactcatgctaggaccggtccattcattgaacggcgaaggtgcatagctatcacgcatgggcgaagccgaacgatcactgcggcgattgcccgggcgcggcggtatcttgggcatttctgacgacgatgacgctgccggcggttttggagatcgggccggtcgaggaggaatgaccggagcaggttgggacatgatgaagttctgggagctgttgacaagtcagcgactgcccaaccggataccccgcgaatacgcttggccttatgcgggctcaaaacaacaatggacacacggctccaatgaattgcagggattaaggcaactactatggatatgcagcaaattgatgcaaggttctcaagaagagagagcctagccatgcgactgataagagtatacggaatgatttgcttacccggatatggtgagaattagtttgaatccaattggaatgacagtgaaaatgtgcaatgagaacagttaagaactgcacggaagtagatattgaagcaattccgaatctgagttttaggaaagagagatgatgtatgctctttctgccacgcctgacgtgctctgaccgcaagagataatgcgcgtattgtactaatacagtatcattacatgttatataagagccaactacgacgatccgttaactcaacgccccgccgatgagatcaatatagggcactttcgcttcttttgttgaggtcctataaatggcttctatctgtggtcaatattggtcttaaaataatgcctgtttctctaaaattatacctttacccgagtgaccgtctcagctcagatcaaacattgatcacatgttctttatactgtacaagatatctaaaaatcagctgaagtatcttacaagtacttattccgtagtctagaacttgatatcggacttattctttgacctttgacttctcatgataagatgatttctctgtcgttggattggctgactcgaccgaggcggtgaagtgtaatgactttccacattgcatcatcgttggctatttatacaactcgactaaccctacattgtacacttcattctaagatcaatggacattcttaacatatatgtgcactaccctaggagctttcagtctcgactctctaggtatcgctttcctttgaccttgtcatacctttaatcactaggatacaccgatctgttcaacaatgagatccactcactaaccgaaacagcgagaatacacgccacatattgatcaccagggctaaaaagaatttgcggggcaatatgacctgtgacgaaaattccaagctccatcccactatttgcgtcacgttcctgtatattattctgtctatgattcaggctagacgacggcttgtctcgtgtagcaagctggacggattgcagcctagccgggtcgcctaagtttcaagattgtcagggtgcaaattaccagatatgggatagttacatagagtgcatatacaatgtaggctgatacccaaccctaattctgccaaatacattcaatctacatctatttccatctggtcctattggtgacacttttcagggccaagcgggtatatattcacttccgtataaacgatagatttgaatttggactcttccggattcgttctttgcaatcccatccccgccaccctatctgtgggggagcgacccggggcggggttggtgcccgaatgccgtttgaagcacgattcactatccttggagtaaatatttctccgatctttaggtagaggtgaggctgacataagtatgaaataatattaggacgaacagacgttggacagtgtgggctgcttttaaacgcctgttcgcccgctccttggccctgatctatgcttcaacgcttagattccaccttctatttcagcactgcctgtccaagacgaactaggtcgttattcttaaccgtttcctgatcgaatcccttcacagccaagtctagaactgccgccgaaagctcttcccgatcaatatttgggattgtgcgcgtgaaagcgttaaggacatggaacaccgaggccagtacagatctcccaaaagtagtggaattgaccactactccgggttgagcgatacagatctcgacccccgggtactcttcaggaagcttgataaccatgagctctgtttcgcactaagaagcagatcgtctttagcataagaacagacagactcgtgcaactataactcacgcgcatgacttgatagtcacccatgatggctggccttttgatcggatctctgggtgtaccatcggcactgaagtagatgaaacggaagggtttcgcgggaccggcctcgtacatggccttgaatcccgcgagagtgcagtcttgacacacgcgcttgacctcagcaaagtcaaagctgcttgttctgaatggtgtcacagcgaccgtccttaaaggcagcacgagttagtgggcttttttttccattcttaattgccataatatcaacgagagtaggattgcgtaccatatgcaggcgtccgccccggcgaactcagccttcacatcagcagaatactccccgtagtctcgaatgacataagcttcgacgtcgggtctgttccttcttcaacttggacgggcttccgagctagtgcgataacctgggtgatctcgttgatttgcaggcattgcttaatgatctccgagcccaccagaccggttgcaccagctacaatgagcttcatggtgagagtatctcaagttcggtaaagttgtcgggtattagttacacagggacgggaatgattaatcaacgttaggagaatgcagaggttacaatttccaggggatactacttatagatcccgtcgggattcgggcccaatcccgttcggtcagtccgtcattggactctagaacctgcccatgtgggctacctatccaactctgtattagaatagcagtctgatgcgatttcaacgactccgtttatgtccagcgctcctacctgagggagcttatatttctaggtgggctgggccacggctctcttttctgctacaaaggtccctttccagcggccccgggtgctgtatgatgccgtcgttaggaaaaacagttatgcaatttcaataggtccagcggggatctggccgaagatgccacccgaccgaaattccctcaaccagcggtacggacgggcacgtacatcttacctctgacatcctgtccgttatagtcattctgatggattgactgactgatagataggcctgtgcaaggcgttcccaatctaaatgtaaatgtgtcccgagacctggtagccaaagctgtgagaggtattattgtctaaagaaaccctgcctgtgagatacatcaagtctccgacaagctgtatggaccattttactgcgttgattgcaatcgcaccattcttcgacgatttcgttgatcgcaggggacgtatagagggcggtttcgaccccgagtggtcgtatggatttggctgtaaaccaggctgctcaattagatggcatagcttatgtggcaacccttgttcgtggagaaacgagttgcatatcaaagcttatgccagtaagtaagtgggcaccgtgtccggagtctagattcacgatccccagctgcgaaaatggatccaagcccaatgccgaatgccgatctactgcatgaaatcgagggacagctggctccgggcagctggatagccaataatatatgggatttaatcaaagttgggttcgtaattgcgggccgtaccccgactcatcgggaatggcgccgatcccgacgaggctgtctcatattggagacgctcgggcggtttccaagaccaacagtcgcaatgttgggggcattgctcagcccgttctcaacaagataccgaaaccgaaaggatattgtcaagtggaaattgtggtgaagagtagggcgggtgagcagggtactgggaagtgagagctggatggactgttacaggcagccctcgctaacacaaaccgccatttgatactattagtaatcataccgcgaaaacacccggttgctatgccaaaaatcccaatcgtagtaggtatagctcttttacgttgaagggacaggggagattacaggacagcgtattaggagctaagccggaaatggcaacatgtacgtatagttacccaagtatcgcccgaatgaggagctactatgtacctaatgggtctgggcgcttttacgttagatacccaagtgtcagagttgatacctacagaaataggccatcatccacgcgcttctaaaccccgaagaatccgaagagcttccgtttcactagatctataacatacagctgaagtcatactgagtctcgtctgatattgtggcggaattgagcttggtcaaagaatacacctttgaagatagatatcggaacacctattctggcggacgcagtccacaaaaagaaaggaaaccacagatatatctgctataggaacgctcatcgactttgaaaacaaacatgtccagcgggatcatcctgaaccaaaccgaggcatacaagtacagcacaataaaaacataaaaactatttcatagcacatcccaatgcatgctgcccaaatggcattttatctctgcaccatctgcaccgagcatttcatcgtgtcgcacgaacctccattccccaggaccaatcccaaaatggatacagctggtatataacaagacaggaacggctcggtgtgaacatcataccatcagacaatcatctgtgcaactccctggccacctagggtcttgctaccaacaaactcttgcttcgtcaggcctgcgagtgcatagaaaacagacgcgatgagaaggaagacggcaccagcaatcaagctagaagccctttcggcaagactgataagttggacaccaccaaggacggcgtaaatgagggcgcgcatccagttagttgtgaagcggcggataaaggaatcgaaggtcgaggatgtgggacaaattcggaggaggaagggcacttctatgaagagaatgacgaatgccgaggcactgagacacgttaggcttcgcaatgaatcgcgagaaatgaatgcgactcacatgctgatgacactgatgataatcagaaccacgttgaatgaaaagatgttcgcaatccctagcgcaaggcaaaggataatgcatagcacacccgtcctagatcttgcgtcagaccgattcatttatatgcgcaagtgattttcgggagtgattgaagggtccaggccacctcacgaggtagcaaatggcatttgatcatttgatcaaaatgcgaaatgctctctcatgacattattcaggcttgtaaggacacggagtgttaagaggcaacgcggtagactaaccattgtccatagatgcctaagaagaccagcacggttagcaggttgagatatggtattgcagaatgtgggaacttactgaaatttcgcgatttgaactcctcagctagcgtcatggtgggctagcgaaaagaatctggggaacaagagctgaagatcacagatgggggtattcgcggatgatcagaggtgtcagagggtccggcaaagtgtacacgcggctgatccagggcggtcaaaacaaacaaaacgggcaggaacgatcgataattttcacaaggtgaaagaaagatctggggattatgacattcacttatgcagtgttgtaaatgtttctaaagcttttgataggatcatcccgaggtcgttttctacgccaagtcaaattccaccccctactaatcaccaggcagacgccaatggtcaagaccccatatagtcggtctctagggctgatatttccacttattccaacgcgtaacacattcacggtctatttttggaattctcaaagaagctggttgaataatcaatgaaatcactactcactaacatcttgaattggttgtttggttgtaacattttgcgaatctgcttctttgtatatattgcaagagaagagcactttacaaaatccgaacaacgtaagatctactccagagctggaaatatagtttgagggatatataatattgtagtcgtgtccttttattttgaaaaataacacaacatattattagaacacagtcacgaacgaatagcatttcgagtgcgatgccttaagctatcagtatgctaggtctgataggatctttatctctcagctttctgcattagctcagagtgtgaaatttgggtgaagtatcttcttcgtcaaagtcaagaccaataaattctagctatactgcgataaaatccacgacatggacggtacccggaacccagtttctactctctgcgtgtatttatgtatatagaaattgagagagatgtctagttatatcaagggagtagtcaaaggagtacgtaatgtaaaccaaacatttcgtgtccaggtgagcgatagcacgttcactctctaccatccaatcatcagttcttgtatttacctcaaagcatgtatctaaagaacggagagcgatcgcccagcgagtcgggattctcaggatactccgaaggatccatggcatcccgcttccggttaacacgctggtatgccatacgtagaatgacagctgctgtcatgcccacgacaacgaatgcaagttcaagagagtgaccaaggatgtaattcggcgcatcttgagcacggtagaagtttgaggacatagctgttgagtgaagagtattagtttgtttgtcaaactcccaattgatgcgcgatccttacctcctgccaggttgcctactccgatgtaaatagccatgccggcagcacgcttgtagtcgcctgccatattcacactgagccatgtgacgtttccggggaatgctggataaattccttttgttgtgttagctggaggataagtgtgcggaggtttgtaaattcttaccgacaaccgccaggaaaataccaaagtacataacacctgggactccccgaccagtagacgcgagacagatgataaagccgataccaatcatgcccataaagaagagaatgaatggggatcgctgcttgcgcctgtctgatacccaggctgcaataacagcgataaccgctgcagtgatataaattggtacctaacataatgatgtcaatctccgcttcattatgaagtagctcagggaccttactgtaaggagctgggcagttgaagccttatagcctaggtccttgatgattgaaggaaggaaaagggaaatgccgtatagcggacaagtgataccccagtacactttccacgaatcagtgaataatacattgaatagccgaggacgaacagaacttaccgaatagacccaaccaaatttgccagtcggtgaaagcatcgatgacatagcgcatttcgaacttatcattcgtttgatcaatttcgcgggaatctgccgagttttgaattcgcaaactgtggatcacaaatcgacgctcttcttcagtcaaaaaagtggcagtttccggggagtcgtgaatcgcaaatggggctatgagtgccacaataactgtaagaagaccttcaagaatgaaaatccatctccagccagcgtatccgccgacaccatccattttctaggaatttcgagacacattagtgaaaagaatttcattgctgtcagcaaggagaatacatacagcgatagcgtatgcaagaagcccagagaatgcacccgcaacactggcggcactaaagaagagagcttgtctaaactgtgctcgatggcgtggataccagagtgtaatgtagtatgctacaccgggatacaatccggcttctatctcgtttcattgcaatcattagtcttgactagaacaaggtggaggttggaaggagggtagacatcaacatacctgcaatgcccaaaaataatcgagctgcgagtagtccaccgtaatctttgacgactcccatcaaggtctgtgtaacatctcattaaatgctgtttgcgatcacccagaaattatgtgcgcacttaccataacaattccccaagcgaccatgatcaaggggagccatctcgatggtcttaacttctttagaagtaggttgctaggaagttcgaaaacgcagtaggtgaagaagaagacggtcactacccacaatcatatgtcaattggccattcttccttgaaatcaaatagccaaaggggttcatcatacaagtccaattgtattgcggtcccgtcatacggagatcgtcaacaagcccctctatctttgcatttccgatattcccacggtccaagaaggccagcagatatagcatgctcagcatgggaatgagacggatgtccatcttccggaggatagccttttcatcaaccccctcaaaggtcggtgagccgaggctggatgactccgcatctgtgacaagtccatcttgcttgagatcggcgctgaatagggagtcttgggtgggtgtatcctcgaagtgttgtggaggggtcttctccggagtgttctttgaatcagccatggtgaacaaagagagatgagagaagagggaaatcaaccagcgcgggacatcgttttccgagtatttatacctatcctgaataagcttagcctaacccggggtaagtccgaaaactggggatatcccttggcatgaggggtaccacatcgggataacacattggggtacttccttggcggttgaccggcctcgacgattcatttgaccccgaaaggaatgttgagcggcgagtctattgattctgggaacttttactagaggtttaatatctcacatagtgggttatatcaaaaaggactacggagtacctatgtggggagtacccgatatgcggggggacacggtccacccatcgtgacttgcggcacaacttgcggcacttaaatactgtaatgaccatactgtagcacagtctgcttcctatgtcgactgacagtataaacagccttatctggggctttgggttgtatccataatccaatgttaaggcagaggccctctcccagatccaccacgatttccaaggttcaaagtcagatcatttttatcaatccatggatatacatcaactggcttaaattgagtgccaacatgctaccagcgacgcaatactacttatgcgaagcccgtcctacccaaaggagggagactaccgagacgttatggatatctcaattgattcccataaagcactgtgttctaattgagatacgctaacatgtgccctagaaaacaggagcgatatcgacgcaacaactccagcaatctggttgagcagcaggtgtagtgcaacccaaagtaatattaccaaattccctatgtgtgtaccattccagaagagggctggtaaaaacgactggaccacatacactcgcgtttggagggttctgcggatggttggtgagtgtggcaattagtcgcgatgaaggggaacaattgtggaactggacacatacataccacgactgtagacgagcataggagagcagccggccagcagccctgggtacagagcttgtaattcgcgcccgaagaaataggaatgaatgcgggaatcacgaagctttcgagagtattgtttgtgggtagggcttgggtttttagaaagagcaaggctaggaccgatgagatggtgagttgcattgtgttttgggaaggtgagggtctcttcgtacaagccaatctcaatacaagcgtggggttcaaagattgggaacggaatctaaggagcagcttgcggttcttatttatagccaagtctagccgttgtgctgccgttgtgctaccggattatgcttgttcaacctggactcatgaagaaccaattgaggcattggatcgctcgagaaatcctaaatgatgttcttactagccaatgttccaatctcatcctgccaatacaattaattatagtaaacaatatcctaatactcatcagatagaggctcgaccttacagtatcgagggcacttagccatatttgcccctagagttatatcatcatagcatagcaccacaacctcttcctcgaccagattggccacagttactatcactcaagaccatatcattcaaggtcacctcccatttacaacaccgccaatttccaaagcacaatggcaccaggcccgtcgaccaaacccgacacaagtacacaatgggacgacgcatcgccaatatgtggatagccgccggcttccccgtaatcctatgcgagaaagcgggcaactacagcagcgcagtgcgctacattgaggaacacaaggcgaacaagccgctgaactaggcacgcaccccgctaagttggaaacaacatcctccctaccagaagccgtcaaagacgcatggatggtcgccgaagctatcccggagaacctggacatgaaaatcgcgattatgacagagctggataaaaacgccccaccggactgcataatcgccagcaactcgtcatcgctgcggagccgtcagatatcatcaataccaagaataattaccgcatctgcaatggtcactattacatgccgccggaccagctgtgctacgaggtcatgtcgtgtggctacacggatcccgagatctttccgtttttgatggagaagctgcccaggctgggctcaagcctgtgcatgctaaggttgagtctactggactggtgtttaatcgtatttgagcgtcgcttaagcgggaaatttgccttgtcctggctgacggcgccagtgatgctcataccgttgatgacatgttcaagagttggttcaacgctaccaagggtccttgcgaaatgatggataccgtgtacaatattgaggctgtctatagtcaacagcgtgatctggatagcactgccacggattggctgaagaagaattatgttggtaagggaaatttgggtgccaaagctggaacgggtttacttggataaatagagatcattatcgactaattttcattttgcaagataaaagataaaagtgttttagaatagaccattgaaactgcagttctgagagttatgacgagacaccaactggaactaatgatttattgggtataagatataactgcactctcgattccgggagtatataggaacgacccacgtcgcctcagacagtccattacagcatgacaatgaactgcagatcttcgacgacagactatgaaacacgattcggaccaaataggcgacggtgacaagggagaagatgaccctcggagccaagtcgccagagtgatgtacaagaggtaaagataaaacgaaacgaccaaaataaagtaaaatagggcatgagggtaggtatcgggggtccaaggaaaaccggccagggaatcaacggtcatcagaagtattaatatgcaggagacataatgataaaaattaggcaaggaacgtagtaaagtgagggggcaatcagaatagcacgacggcaacagataagtgtgctctgaaacctcagaggaaagggtatagagtgaagggcattaggagcaggccccagggtgtgacttgcaatcattagggtgtagcacaggcatagggccatcagcgcagagggaggggttgagcagtgaagaaacagccaaactaggttaaagacaatcgcgcgggcgaaaccttgaccaaagaaacaataattaaggggattttctgcgatgatggactttccactctgctttagcgacacgcataaacaattcagtgtctttgatgggaacccagctggtgaggactttcatgatattctcaaagtcggactcgagaatgatgtcacgcatgccatcaataagggcagcagatgaagcatgcaagacgtcaaggccttggccaaatgtccttacgttatcattagtggggactttgttcttcgatccggaggatacggagcggccagtgttgtcttcggcatcaccaaggagcatgaagacatcccacacccgaagttgagctgggaaggggatcgagtaattgaaaagtgtgaggtaccagcgagtgccgtaggctgtgggtgggattccgacctcgttctgaaaaattaagcgttagtagacactcctcgtgtttcgagcgagattgacttaccagtttcgtggccacttcacctccggcgagccactctcgttcaaagtcggccaaggcctccattagtccagcaaagccggatttgtacagctcttccagacctcgcagctgccacaatctgacgagcataataaaagaatgctcctcatcgtaatatgctagtaacgtagccgcgagagttgccattccctgtacgtagccagtgtcagggaaatatagtgacatggcgtgaaggacacggaacaatagtctttggccaccccgatagcgcctccgaaacattatatggctggagatagttcgcggtacatcgatatcaatctggacatcgtccggtgatgagatgaactggagttcattgaaggcttcgatgagctcgtccgcaggtgcgctgcctttgtggcgccgggcactggcttcaaggaatgagtaccaggccgttgaccgccaccgatctggaatgcctttccaagttcgctcgattaactttgagctctgagtatcgaactcaaaggtcataccgccgccgtccttggtcttcttagtcggcttagccatcttggtccatttgtcctcacgtcgccactccttccttcgcatcgcgcgagtaagtggtgcaccttccttctcaccagatggagtgggtagagtgagcatgtcagccgcctcatctttggcttttcggtctcggttgtgaggcaaatgattggtagcggcacgcatacgagatgtcgagcggcgcaatggcggaccatagttgctctgtgatgaagatggacgcgcactcatagaagtttgggatattttgcggactagagacgcaccattgaaagaacggttactggctggagcggttggtggacgaattgaacgtttccggcgaggtgtctcagaagctaacagaaggctagttgtaactcgctggagcgggtttatatcggaacccttggagttctttgcagggcgaatgaagccataacgatcgacttcttctgcaccgacattttgccaatattcagcaccacctgctagctcctgtgtttccctcttaattcgcatacgctccacttcgccagacgtccttggtttgagttcattcccagcctcatccgtctgagcagagtgtgtttcagaggtttcagtatccgggaccgcaccctcttcccacaagactccgttctctgaggccattgctctcgcaacctcggagtcggtaacattttcttcgcccttctcatacatcagcctaactcgccgtgacaacatatcttcgtcagccgagattgctctgctgggaagactagtctgtctcgggcgaagagtgccttgaggtttgacgtgccgtggaactgctttcggtgctccgttctctccttctggcttgctcatggtaatggcagggggtggcgcactttcagatgtctgtcgatccaactgtggatcgcaatccacatccgatatttcctgggctggtcggcctaattcttgacagggtttctgaagaggctcctcttcttctagatttttgtggggcgagtctggttgttcgggctgctcttccagcttctcctggggtgtttttgggcgcggacgtttcgcatcactcttgatcagacttccacgattggaaaactttagcgacttatccagaccacccaaagaggccgtcggtatttctaagggaataccagcgaaagggtgctcgatttgaggcactggcggagcctcttccaagctaagtctcctctccatctcgagtgaccgtttccttaaaccaccccactttctttctgaccatcgagagcctggcctcgagcctggcctcgagcccggccgtgagctaggacggaagtttggttcattcaccagaatgctaggcacgctgcgcaaggagggcgcgccctccgaccgaatcgttcgagtttcgtcaccaacggacacggatggtgcgagccgggagaacatgagcacggatgcacgatcattactcggaccggctgacgcggcgctcgtgcttaaagatcggccattggaggctattggcgcatcggctgtgggcaacgagcccgaccggattgcaagaggggcgtcaacggtattttcaaagggcacggcgtgaatcgtcggattggactccgatcgatcgtgcgataacgatacagaaacctcattcaccattatcccggcatgacttgcgaatctgcgcgtgggctagaatcgcgtgaaagaaaggagtgtagggacgaggcgaaaggggtggaggccagattaagcgaaaatggggatcaaagtagaaaggagcgacaaggggaaaatcacaaaggaagttcagtagaacagaatctccagaattaaaattgagagatacctggaggcgtggagttattttgggtcggtcttggcgctctccaggtcagttctggccttcaacggggcatcttcggagtttccgtcatctcctggctacatgtaacacgtatatctatgtaaatagtatacgtatacgtgttcaaaatatctatgtagcctgactatctccctaccatcctatgagggattctcaacgtccctcttctccctcatttctccctcaaaatagatatcaaggggtttgtcccacctctatgggccgtgtgtggatcgtgagagaacaaggagtgtaagtggagtacgctagttcgactccgtaagttgcttacattagaatgcccaacggtgggatgtgacatgaagaggtaagctgtttaattgtatccgcgtatacccaactatggagtacatggaacaacacagagtatgttgtagatgctgttgaaaccctcaattccccaatacgccccagatgtacaaaacacgtggaactcctgtagccgaggcttggacaaccggccgttagctgtcaatgctcaatgtagtcaaaaggggaaaatacccccagctagaaccaacgtaaaaaaaagtatcatgagggcgtgaaacggtcaatgcagtgacccagtgttaaatgcagctcaactcatagctgctgacccgatggcgagtcgcgatttggtcgagtccgatccacaggctctttaggcaagagttcgatctgacggaccaggaagctcttctcatccataaattgatcgtcgtcagttcggtcctccaagaacttaggcaaaaacctcaacagtcgatcacggttattgatcagaattcgttgcactgccaccgatttggtcggattggcaacaaacacctagtcccttatcagagcaagccctcgtctgttttcggagccatttgagggcaaccttaccttgaacacatgaaacccttcgtattgtaccatcttgcgatcgtcccgtagcagtttcatgcagagcttgagattatctccactctccacgtatgccatcatcacgttgtagttcgcacggtccaataggatctcccccagaagtttgatgctttgacgcttggtcacatacgagtccgagtggaccaggatgttattaaaccgcccgaaaaatagttcaaaattggctgcgaggtacgaggtcacgaggctcttatggtgggtcaaaatctcctgtagaagatatgccagtcagtcacttattatcaaccttggaataggataggtatcgttctggaaattaccctgaatgtcgtgaacgcatctgcgctgacttcgaaattgctcttgtcgatccaatcaaaaaatctccagaacacaccatctcctctctgcggctggttgggcttcacgtcggatagtcgtatggccggctctccttcattggattgatcatacaaaacaatcgcagtgatgacatcgaatttcaatgcctctcggagaatgacaccacatggcattgcactttgactctgcatgtagccccggcataactcgacgatgatttctggtcgatggtggacaaggtatgaaatgacgggaggatctttttcggcggcatatgaattaggtcggaaccgaagtatatgggagaacacggtctgggtgtcttttctggcttcgaagggaagtaaatggatgctttgggctagatcaaagagtagatcttcctgaagggttgcttgtacgagtgcatggacttgatccacagacgcggcgacctctaaaacagaagattgttgggttaattttacattgctcgttaggtgctacttccaggatacccacctggtgttccttggactatcaccttcatttgactgagttgcttagccagctcctcttcggcctagttcattcattagtcgattgttctccccagctggatgtctccaaacgaaccttgggagcattctgggagtcatggatcctcagtaatagctccttggttgtccggacgatatcagcaggttgccgagaccggccgcgattgaaaaagaaagccatggtgagatgggaagaatatgcggcaaatttagaaagaaactggagatgaatgcgacatgggataagttatgattgcaacggaagaatcaagatcgagtccaaggggaagcaaatgtgatgtattcgattgcaagttgcccaggtgcgaataaacaaaccggcggggcaacggggaacttaccgcctaggcacacgccgataacgtttttttttttttttacgataaggttgacacagaaatatgatcatgatacatagcttgatagccaaatccttgagagcttgtacataaacatgtcgtgaccctcacaacacttcatactccggtttcattctttccaccatggaacctgaacttacaaaaaatgtcagaaactctgaacatgacgagccgtgagtctttctttcacttcgacattaataccattttgccatttataagggtattcaagaacttacaagccctaattcaaatacgcctgttctctctatcgagatagcacctagtatcactgtctcccttaattgccccttgggtatcctcgttacagttcaccgagaggaagatggcatcaataagccctgcatttcccgctgggacgtgcactgtgacgcatggggtcctttgggctttatgctcttcagacatacaccacaaggtctgaaaaatatcgaaggaaatcaccgttccgagactttggagtatacagaatgggatgggcattttgataggcttctccctggccaatgtctccgaaggaacttagtgacctcctcccagtttgcaatcagctgatcccatgtgagaaataagagctgctctaaccaggcgctgaatatgctcttggtcgagtttgttgtcgttgacaacacataagattcctagcataggcttactgcttgctatcttatttcccgatcaagagatctattctgtagtatactccgtagttataatcttaaaaccactagttactccgtacaacttaactaacaagtgaggctaactgaccgattatcatatcacgtgttttagtggatcaccggtcatccatggatgggtcccataggtcagatcaaatgtcgtctccgctttttttttctgtatcaaaatgatctctgcccctccccctccaaggttgaaacaatttgttattgtcttataattcatgtcagcctctaatatcgtgaacccacccgtgggtgagagtttccctgactcccagtcagtatcggattcgtccgattccagcaacgaggagggctgggaagatgtcgaacccgatgaggagtcgcagcctgtggttggccttttcactagccaggtcttccccgatgcgcgctcaatgctgaaggagtgcaaggaaaagtacaatttcgatctgctgaagattcagaaggaccttggtatttccggcttctactcttgcgggattcaacaattgaggctaacttctttttcccgcttttagatttggatttcctcgacaacatcaagttggtcaactacgtccgtactgaagtcaagaacggaaacaaaaaccctgatgtctcttccaagtccaaattcgaggatgaggtctatctcaagcccgttttggaggatgacgctctcttgtatagcttggacgaccttaccgaagagcaggtcgaacatgctgtccccgccaccgagacaaaccgacaggttctcgaactccaggagaacttggagcgattgcagacccaattctccgagtaccgtcttgctgtgcagaagtcgatggatgaccaattgtcgaaagaggatgataagcttgcagaatccaaccctctgccctcagctaaggctgtcgacagactgcaggatgctgaagatggatatttcgtatcttacgcttacaacggtagggtttctcgttgaaccttcgatgcatataatactaacatagtccaaaggcattcatgaatctatgctcaaggacaccatccgtaccgactcttaccgcgatttcgtctacgaaaacaagcacgttttcaaggacaaggttgttcttgatgttggctgtggcactggtattttgtccatgttctgtgccaaggctggcgcaaagaaggtcattgctgtggacaactcgaacatcattgaccgagctaaggaaatcgttcatgacaatggccttgaagatgtgatcacgtagggctcataatcatcccgcaatgaagagacagtactaactcatattaggtgtatccgtggaaagatcgaagaagttactttgcccgtcgaaaaggttgacatcatcatctctgaatggatgggctatggtcttctttttgaagccatgtttgattccgtcatctacgccagagatcgttatctcgcccccgatggtcttatggctccttcgcatgctaccctgcgccttgctccctatgccgacccggatttcatcgcgtcgcacatatccttctggaacaatgtctatggtttcaagatggacagcatgcttcacaaaatctatgatgaggctgtggtccgcagcaaccagcccacgactattgtcggagagtctcagattttcttgactcttccgctgcacaccatcactgtcgaggagctgtcgttcctgaaggaattcaaggtcacattgaaccaggatattgatgccttggatggatgggctatctggttcgacatcttcttcatgccctccagagagtccgttctacctgagaatgccatcccctcagatatgcaaaagaagggaattgtctcgttcaccactggtcctgatggaaccgagacccattggcagcagactgtccttctcattgaccatgccaaggatcatggtaaacaaggttcccaggccttgaagaagggccagctcatcaccggcaaaattggttacgagaagacggagaagggctctcgaggagtggacatcagtgttcagtgggagtccgatgcaaatgagaagggggtccaactatggagccttgtataggatcgactgatcttttgatacgttttctgatgaactaaaagagatatgaccacctacatagaaaaggacggccctattatctaggtgtcgtttatttgacctagtgaatacaaaatgattcagatttaggaacaagcaatgtaatgggtatctttgtcgtaattcaggtcatgatctcgtataaaaaatagaacatctaggattgattcttcgcttcggggatttcccgcctagcagtctcaggacgtttatcgtgacgatgactatgactgcgatgagaggagtggtgatgagagcgacgatgagagcgatggtgtgagcgatctcgacttgaatcttgacggcgacgatgatgtctgtcagaacttcttctgttcttctcacgttctctgtctggcgcatccaatttgaacccatcgaggctgttcactgacggggatcgccttcgccgatggcttgactgccgtgcctcttcggatttcaaaatttcgatttctcttcgcttttcgtcattccatcgcttccgttcctgctctgttgttttcaactgacgcacaccccgctttatggctgcgagtgggtcattcgcactcatacgagcctgtgtcctctctttgcgccttggatcctcgttaccccacacatctttctcgggcattgaccctggcgctgttacatcttgttccgtagaggaataccacggtttctgaccaatagtctccttgaagcctgcggcgttggaaaacctcattgtgtattggtcttcatagctgcgtttcttgcgtgccgcttcagcctccgcttcgatatttttttcagttttcgcacttgtggctgggaaaagattgatatggccggctttgtctagaatcggtgcttgtgctgcgtcagccttgcgagaggcgagcatcaactcttcctgcttagcaactgcttgtgccgcatcctcccgagcgtagcgtatatctcgatccgtgtcatcttccccagcaactcgccttctcttacgaaatcctccagcatcgctggtggactttctgtctgaccgagccccgggttcagatgacagatgggagggcgccggtggaggtgtaggcggccgttcgccgcgaagaattttgatcctgcgttcggcatcgacctcctgcatgatgcgttcatcttcttcctcgcgggcttttgcttgcgcctcgtcgcgcctgacgcgcgcgacattatcgacattgtaaacgttccatgactttttgccgaggagatggctatgagataattagccgctttcgcaaatatcataaaatcgaaagaaaatatccacttacagaggcatcttgcaaattggctgactgttgtatggacgcgctcgatagcaaagagctggtcttatcgataatgacgtccccacgggccgacgctgttcccggtggccaaagtggccccgtctacagctctacggttccaaccctcttctcttcccttcatgattaatttgctttggatatcagcatatatccagtaaattcttggacatcacattctgagaattaatcctaggtcatccgcgctgcagagccgactgacttatagttgcctgctcctttgtcgacactgtcgctaaagcaatagtttcaacggttctccggtcaacctctctgattagcgacaatcaaacggtttatcatgttcaatcgcggcaatatcccaaatccgttcagttccagcggacaatcgtccccgcagggtcactcgcaccccaaccaagcacccccacggtatgatatcgaccgctccccctcaggctatgcgactcctatccgcgataacgatgtgccgatggctaatatatataattatttaagcagttacggaggccaacctccaccaggaggaagacccgcgccgcagatgcctcctaggatgcagtccggacaaagaggtgggggccagacttggactcttcatcccagcaagagtccgaacgaaaactacacatttggaaacctgtgagtataatctagctgctttgtcttctcggagactgatacacaatagcgttgctgtttcgccgcaggacatcccaccctcacgagatggcaccgacgtcctcctccttatcaatgacctcttcgtcttctctgctcgccctctcgatggtttccctcccggttttatgagcatgtcggatcctcagcgaacatgggccaacattggattgagggatgcgatcaaggtacaattgtacgatccgtttagccaaggcggacaggcctacctgggctccgcggatattgaagtcagcttcgcatctaccaagaagagagttgaagcaccttatgaccaggatgaattggcacaggcggtgatcagggttagtcaacttcgtctcagccacgaatgtatgctaatagaacctagaactttgagaaccaattattctcacctggccagagaattctgatggataataagagtatcccactcttactgcaggtcaagaccgttcagcgggttgatttgacatcagagaaggccgatctcagttctggacaagtcgaaaccgatccttcagccagaggtattctcacacggcacacccaactcaactttttcaaggatacccagactggtattaacgtgaagccatctaatcgccgcccggcggctaactctatcatccaaccgggcttcaagttccaggatatgggtatcggtggtttagactccgagttcagtacgatcttccgtcgtgcttttgcgtctcgcattttcccccctggtctggttgagaaacttggtattcagcacgttaagggcctgttactttatggacctccaggaacgggtaaaaccctcatcgctcggcaaatcggaaagatgcttaatgcgagagagcccaagattatcaacggtccagaagttctcaacaagtacgtgggtcagtcggaagaaaacatccgaaaattgttcgcggatgccgagaaggagtataaagaaaagggcgacgagagtggtctccatatcatcatcttcgatgagctggatgcagtttgcaagcagcgtggtagcggcgctggcggtggcaccggtgtcggcgacagcgtggtcaaccagctgctttcaaaactcgatggtgtcgaccaactgaacaacatcttgttgattggtatgaccaatcgaatggacatgattgacgaagctttgctgcgtcccggccgtttggaggtgcacatggaaatctcgctcccagatgagcatggccgaagccagattctcaacattcacaccgagaagatgcgaaagaataacgtcatggataaggatgttgacttggccgagcttgctcacttgaccaagaacttttctggtgctgagatcgcaggtttggtcaaatccgcctcgtcctttgctttctcccgccacgtcaaagtcggcactatggctagtatcaacgaggacgtggtagacatgaaggtcaaccgatccgacttcctccactctcttgatgaagtcaagcctgcatttggtgtgtccgaggaagagctgtccagccgcattccatacggcattatccattattctgcgactatcagcgaaatcctgcgggaaggcgagttattcgtcaaacaggttggagtggctgagtcaactccacttttctctgtactgcttcacggtcctcctagcagcggcaaaactgctctagcagcacagattgctattgactccggcttccccttcatcaagttgatcagccccgaagacatggttggtttcagtgagccagcaaagatctcacatatcagccgaatcttcgacagcgcctacaagagtaccacaagtattgttgtcatcgacaacatcgaacgaatcatcgactgggtgccgattggtcctcgcttcagtaacagtgtgctgcaagccatcatggttttcctgaggaagcagccaactcacggacgtcgtctgttggttttggctacgacaactgagcgtgcgttgatgaagcagctggacatctacaactccttcaactcggatattatggttcccaatgttagttcctttggtgaactacggtttgtcatggagaaatcgggtgcatttgatgctcgggagattgcgcaagccctcgagtcagttggtggacttgcggatgacgggcgcttgagtgtcggcatcaagaaggtcctcttgggcattgaaacggccaaacaggattcggacaaggtcggccgctttgttcgtgttatcaaccgcgctattgaggaggaacagagcttccagtaaacactgtttataacgggctttctattactgagtattagaattaaaatagttctgaagtatatatctgtttacaatcctagtttttcttttgttggtatcttcaaagttcatctctaggcaagccaccaggctagaatccgagaacttatcaaacgccaaatgaccccattcagactgacataacgttatctcagaactgtttgataaattctttctttcattttgacgttatgtttatccaatggccgagccttgctagtttgtcatgttgactacttgtaaacaacccacgcaaagaaggttctatttatataaatcaacacgtcaagtgttcgaacttcctatgaatttcagccttgatttggctcgtatcggactgtaagtgacaaccgttttggtgtgtcaggccaagatatatcggccgtcaatgtcaatctcgcagttacacaataacataccatacaatgatcagtggtgccctatgctctagttacagtcctagagggaatcaggcacacttcaacgcctgatattacaggtttacaggcagcaattcctagaccataccgaaaaacacgtaaaaccaataccatttagaggcactgctcgactatacttcaagatacgcaaattcctagccagcatttacacaaagacctaagcaaaagagcaaaagcgcgccaaaccaaacaaagaagcaaaaaaaaaacataagaaatccatccttcatcccaagatcgcaatttttgttcatcaagggggttgccctttcatatcagtcatcaacaagcaaagtgcagcccaatctgagcccaatcaatagccatcatgagcaaacttcttcgaagagcggcggtactcatcaggatgggccttctcggccttagctttcagggcactatttccagccacgtgtgtcagccttctagaaactcactcatcggcgctaatgccgcaggcacggcgctgatcgacaggcacatgccaagctcacccagcggagcggaagcccctgtcgcggagcggagcggaacttgcacgtccatcgcaccacaatgcctggttttaggggtgaatttgcttacctgacacgcttttgcgtccattccaggtcgcgctttgtctctcttgcggttttaaggccttcggagaaatttgctcgtgcgccttttagtcgtcgttgggcgagcgcttgtagctccagcagttcttgctgttttgcgttcagctggccagatctgcaagtgaatttcgctgttagcttcgtgtttgaagatcttgggatatcttcctgggtcttgttttgtgaagcacaatctctaggtggtggtgatcgctgcggggaggaattgcaaatgctgatagtgttgcatggaaactcacgtctgcgcctgtcgtgccagacccttgtccaatggtgttggatcaaatgcatcctgcatgcggtcgcttaggacatccacgacatcgacaccggagtacgatgcaaagctggagtcgtactcgccagcagagctgaaggtgagcccaccagaggaacgactgccggcggtggtgcttgcatcagagaagtctggtggggagctagagaccctggaaatggggtagagagaagctggtgccggtgccttggagggtgcatggtggtatgggtaggcagcaggctggtaatagtgacgctgggtggccatgacgacgattgactgcaacaacagcaagtgttataatggaagaaagaggaagtatgaagctcaagtggacttcaatgagataagaagaagcaagaagatgggaagaatgtggaagaatgtgtaaacaggcctaactaggagtgatggtaaaggaagaagaaagaaggactgtctccccgggtcagacgagggattttataatcctccgcggggagtcttctgtccggcggatgctcccattctatcggatgcgaatgtgatgacaaggattgcgcaagcctcgaaggagccattggaccactcgggacacattgactcgcacccctccctctgtacctccaatccgagctccgcctgcacgtatgtctccgtatctgcccgcctatttgcctcttggaccgccttgaccccgctcagagtggaaaaaagactcaatgtgtctgggcgaggacgccagccttcctgcattagggtttccaccgttgagtggcggcttggtgcaaaataggtctcgatctacgcccctcttcctggtttcaaatttcgggccaaagcgcggactaggactattcagcaattgactagaaagggcgttcgatgaggttgggatgggtggagttggtggaaaggtgagatataaatatgaccttcgccgtcattcctactcccactttttctcgactcttttttctcttgatttctcacaattatccttttcccttcccgctctcatccccgttgaattgattttttcttcagaaattcgggggctgggaagaggacgatgaatgttgattcgttcgaacaaagtcaaagataagacggactacacaggagccggtatgacatatttctccattcaactgtcaaagtctaacatgatagttagttcatcggcttcctatacatatacacatgttgtagttgtataattgtggttgaatacgcgcttccgcgaaaaccaaagagattcacgggatgtctcgcggccttacatcgtcgttgggatcggagcccaagagcccgaaagtaagatcgctgcattcaattcaagtcacacggagaatgttggacatcactgcatgaataacaggaccgtgaggaatattggcattcgaaactgctcccgactcggtgaccctatgcttcttttggaaggttctaacaagaatcatcctagcaatatatgagcaaaaagggaaaaccgtgtgaccaatgcgcaacaagtccaggtccaatgacaagaggaaaaagaaaaatacacaaggtgaacgttgatccttcctccgttttgcccgcctggatgcggctgttatttctgcacccgacgagaaagacccccctctcgcacgaatccaccaatagccattagagccttcgacagcaggcaggacagagggaatcatcgctgcatcgagaagcgctctagacgcccatcaacgtgggaagagcacgcagctgctccccactctatgcatatagtcgatgacttgcttgacaatagctatggggcatgtatgataaagggaagccatccggcaagccccgtccgaaatactatatttcgagagatgctgtgccgcctatgaccgttcatcattggtcccagataattgctgacatcaagacgacgcagtgcctaactaggtgggaaggaaatgggactgcaaggcatacccttccaggtgggtgttctacactgaaactggatcttccttgcgcactctaaatctgcttgttctcttttttcccgcccgttgatgcctcactatgcctaaaagccagcctgcatgccttacagcctgacgattcacgatatgccccgtcgaccgaggaaccctgtgacaccaccgtcctcaatcgatcaaaaccatggcttggtgaatatcgcagggatgccattcgtctctgctgaaaatggccgagcccgatctcttattcggctaggccaacatcgggcagcacggcaattaatgacgcacagtacacacttcggcaatacgcctctttttgtctgatcttgctcttcgtcatagtcttcccaccaacttcgtcctgatcagcccccccttcaactcggactccggacccaaaggtatattcttttgaaccttccaatgttaatactccggataggtacgatgtcaactgattttccttgcgtcggttacacaagcccgctgttttgatccgaatgtgttgaggggaatcccattcgtgcctgtttttattgaccatggcgttcaattaaagtcctttttgcctattagccgggtgtcgacaattcttctactaaatccaatccgaatccaacaagtttattattttttcagcgcacaagtggggggttgcggggattttctacttccttcaccgccacatgcgccatggccaactcactcttacccttttcgggaagtatctatcactctgtgcctaccgagtactccgtacatatatgtactgtactatcatcgggatgatggcaaaaataatgttcaaaggattggaatctaggcgcatccctcggtgtttacttcgttgaatgtatgctaaatcaaacaaaacaaggattgtcattttctcgaaaacactaggctctagaatagctcatattttcagggatataggagcatctcacattgaatcttctaagagtatacatactagattcaggtacaaggcctctcagcgggtttaaatacaaccactatatcgacgtgatggaaagttcataaagatttttagtgatgtttcctccgtagtcctcaacgatatagcgcgtaatcagaatttccagttgtagaagtgctcaataagttgaaaatccacaattaaccttggaaatggccaattttctgctggcaataaaagccaagagaactaaagcccccagtcgttatgcactgcgagacctaatggccaccacagcgtctgtattggggtgatatattcgtacattcccagtgattgtctttgtttacagttctcgttattaccacactcgagtgtcattagtagtagcagtagcatttctgacaattttcaagattgttggccagctgtacatggctatgtatacaatctaagtcttgctactactagtaccttctcgcaagtcgagtgcttcgcttcagtattggttcgatgctgtagagcttaaaattatcatttgatacttcagaaaacgcttaagttcggagtggagacataatctaaggatatgtgttgagacccttcccgccttagattgataggactccctaccttgtttggtcttattcttctctttatctcagccagccaacacaatacaacccatcgtttcctttcccatcaatgtttgggtagatctattgtggacgtgggcattcaatcacgtcattgttccattgtaagataactagttgcaccagatgtggctttgataatatttggggaattgttgctccccctccctgaatttctagtaccgccttcctgatttggttgagtacttgctcgacacttgcttctgcctaccgctgtcctcaccgcctcttaatttgtacaccgcctttgtatggaaatgcatatgatagtagcaacaggcttggacagcaggtatctatagcatgtattgaagagggaaataaacgatgggcagcctggctatgcaggcaagatgaaaacgacataacaccaccaaccatccgggaggggtcagctagcaagcatagggaccacatagaccacaccatagtatacaatctcctagtacacaaacatcttgcgattctttctcatttctggggtgatgtttcgtctagaatatctgctccccgaaactctacttgacatccaggctctcgttttctctgcctaaaggacaaggccactaaactaggcattccgactttccccactgcaatatgtaaacttttaataaaagtaagtcacttctatcatagcttgtatcaactgcttgatccataaagggctgaatcacacaggacgcaggtagaatatacgatttttcaaccaaaattcatgtctttttacaatgaaaccagaagtaggcagaatatatggcataatcacgagtgggacccgatcaggaaggcggtactgaaaattcaggcagcgtagcaacaattccctagttagttaactagttatatttgacagcaagaagtggggagagtgacaatcaacttgaggaaagaaagggggtatgtctacatggagatttcgagtttgttcaagcctttatgactctggctccccaacacgtgcgagagccttcagacacgaaagatgcttatcctgatgcagggcatcgccaccattcttgtaagccctgaggacctctgaatccctttgtttgattatgatgaccatgtactggattccatcagtggcaagctcttccagggctttctcattggcctccttggcttcttcctgaatctcgtggagtcgcttcagccagaacatgtatctccatggcgaaaatccagcaggtgatcgctgtccgagctccgattcaaggaacttctcgccacccttgctgatgtcgctggggcattcgttccaacacacgtctgatagtaagaggaggttgtggtttccatttttcagccaagcaacagcagctggtaatagttgaaagacctcaagctgatagataccacggttgaggtcctcctcgtctgactcgctctcaccccggagtgttttagagctttcaaaaagatcacggaagatcagaagtgcaacttggcacagcctatccttagcgacacgagtggatgcgagtttggctaggaatgttgcaaagttgagacggtgtgttcccgacatagaaccaccgttattgatccagaactcggtcatatcgctagccaaaaaggggagatcattccaaagtgtcccgtcgacggttcttgcgatatcaatcccacaggttcctcgtgaaggtctagtcaacggccccattccttgaatgcggacgatatcgaggactataccctcatgttcaggtgattcggaggagatatttcggccaagctcgtagtacatataccacagggaatgaatatggccttcaagagtatctaaaccatcaccaatatcgcagtatcggctggtaacgacccaggtccggtcatagaaggctacatctcgaatttctttgaaatcaccccgagcgatagactggcgggtactttcctggtctctacgagcatagtcgttcgttatgataataggagcacctctaggcagagagctcagcagagaatcacggaggtgttgcattttgggaacctgacaatgctgattgatgattcaactagaattcaggtaagagaaaaaagacagtaggaaaacgaaaggattgatatggtggagccccgcgggggcttaatgagaacccccggtactaggcagcaacgtacagctcaccaatatctgaattgttggacttcggtatgcgctggcaggatgtactgttttcttcgctggttgtcgatcaaccagcaagacagaagtgcatttcctaatagactgggtggccctaggttgtggccctggacctatttcgacctgggatgatgccccagccctatttctaggcgagggtactcgggatccggttcggcccggcccagtggatacacacggtggtctccactccaaggtatcttgtgggagccctggaggtcttacaacctcagcaaaggttccggaattatttttattaggagcaagggtgactagataagagggcagagagcattcgatgcctttggattgctttctcaataaaacgcgccggctcaatgaactctactttgcctgactcgatcgaaaagccaccactgagcgtggatctttggtgaaacacattctggcagatataaaaaccagtcatcttcctcgtaagggcgaaggcaggttgtacaccggacagattcaaaatagtcagggtagaacccgctatattcccagtcaagtatcccagaaatcacatacttgttgtcggtcaatttaaccgtgatattgtccggtgtgatgtctccgtgtgtgaacacgatgcgagggcccgaattattagtaaacgatggtgctaattgacggagaaactcgatgaacacgttgccgcctggatgcgggcccaagaataagaatgtttcaaaatcctcaaggctgaagataggtgtctcgctcactcggacatgcctcctgagatctctgcagccttcacctgcaactcctcctaaaggagtgccttcttcaaaaggaagagttctcaaatctgtaagcattgtgttgagttggttgctaatagaggttttttgatcagagtcgagtgtatgccagacttccctaagcgttgtagatcccatatgactcatgaatatcaaagaaatcccgctcatacgtaccaagccaagaggctttggcactggaatattcggcttatgacggtcaagatattgtaaagcggtatattgagtattgtgttccatatagcgaacggctttgataacgatttccgaagagcatttgaacactcctttgtggtgaaagaagggagctttgtaaataatctcactgctctttaggacttcaaacagcctttgagagagtggcaatccctcggcagtttgtgatattggttcgagtaattttgcaaccgcatccgaaagaggaaacacaatttcaaccgggtctgatgggcaaagggattctcggatgtcttgctcaacgtatctgggtttctctggcagatgatgatgtcagctatgcgaataaggagagtctaaattgcggtattgtggtgcttactggggctttcgattgtggttctcattctcaaaagacgttccaaatattgagtggggaattgatcggccaagtcgacctctggatctttcgtgagtgcggcttgtagctttttcaatgtacgggcattgaacctcacggcttcgctgacagattgagtttcgctggcaggccgagcttcgttggcaggttgagcgccctctaagtcgaacgcccctttttcaaccatcttccgagacggcaatctgagacctcacgataaaaaaatagaaataatgatctcggatgcctaaatggaagggaggataagtaggtaaaagaaaatggtgactctctagtctgctttgcatgttgtaccttggctacaccgccattcctcccatccctatagcgagctatgcaggccgaggccgagcatctcagtcgacactatcgcaatcgttctcagtagggcaaatgtcacaatacgtactatgaggaggactgcctctacccttcaacgggcctcgaggttggatattactcttgtatgatgcaagggatggtgaagttatggatagctaacatgcattagatgattccctctcttttaccaagctccgagctggccatcgtttctcaaccgctgcaatcacaagagtcaaaacaagctcaaacgcaaagaacatagccgcaatctgatatccgactttgaaatgtggcgcctggctggtattataagccaatagaggaacccaggcattgaatgtgaaggcgactgcctccatcaccccaataacaacaatacgatgctcagccgagaaaccacatgtctcactaacccaagacgtgaaaataattcctgcacccgtctcaacataagtcaacagccaaccagccatcattgctgcggtgttatgcaccggccaaatagagagaattatagtcccgaccaatgctggtagacaagcaaacacaatgacaagccaacgtatctgcaaataatcgcttgtttaggcatagaggagcgtaaaaatgatttgcagtccatacccagcagatgggatgacgttgacttgttcaactgtgtatctgccggttgacttgagccacacgttgaaatacgagtagatgcgcaagccacaaacgtgagcaatgaagactgtaggaatcaaccacaccggccatgagcgaatgacatctaggaatgttctccatgtgagtttcgaagctggtgcacggccaacggcctccattctctgcgcggcatattttgtatcttacttgctaagccatcgggttttcgagtcattcggagaatcaggaatagcccgaaagccgtatagagcaatgggtactctaagaataccataagaaataaacaaccgctgccaagcagagagacctgcgcggccattcatatccgaatacagcgctgcctgaagatatcccgaaaacatgttggaagcactagaggaggcttggaatattgcgctccgttttgccagttcctgtggtgtataccaattccctagaagtgtgatgatgcccggataagcggacgcttcacaaagtccgatcaaaaagcgcagcgcaaagagcgtttcaacattctttgcgcttgcgagtgccatgacgaatattctccatagtagctcaagggctggtaaccaaatagacggcctgatcttggtgaggaccagctgggatgggagttgcccgatgagatatccgatgttccagtatgtcgtgaggtagttcaggtcattgccctttaggtcgagggcttctttcatacctgagacgtaggcattggaagtctgttcatgccaatatcagctttgctttatccgatcgatgggtcacttacattggattgatctaaagatttgataaaatatgcggtgcaggcgtagctcaatagccaccaatccacctgaacgagtttgcgctcacggggagatttgtcccagatgtcccaaatcgatgccttcagacgcgctcgcctagcttgcggtatagacacctccggctcattgcttggtcggtcgagctcctggtccttgacctcatgtcttggtttcaattgatctccggacaacatagtctctgaatttagcagtgagtaatgtaatatgttctacatatcaatctatctcatttcatttcagtaatatttatactacctagcacttttgccaattgttctcggacaggcacatcatagagccctagcggcgcggctccgacaggttttaccgcattgggacgaaattgcacattatataagcttatggcgcaaggcaacatcccatatctgagcattaaatagcacagctactgcaagaattcttagtctttccacgaatcattatggaaatcgaccgggtagctgttatcggcgcaggcccctgcggcctaggagttgcaaagtatgtgtttgcctatcgagacaaagaagaacgtgaataattaatagtatgccaaggtatcttcttgctgaacgaaaattcaagtctatcacaatattcgaacagcgcgaccaacctggcggtgtttggaactacaccggcgatgagggcatcagcacatcggcacttgcccgtcccaacccgagtcaggagcctcaacagcccgtgaaaggaacttttgcttcccctgtatacgacgcacttgaaacaaacatccctaaatcgttgatgcagtttaccgagtatccgttccccgcggccagtgcgctattcccagcccataccgttgtgcgagactatcttcatcggtatgcagaggaattactgccatacatacgtctgaactctttgattttggatgtcacactgtcaaaaaagcatccaaggcccgagtggactgtaacctggcgtgatctgcaaactaatgagattttggtcgagcaattcgatgcagtggttgtcgccaatggtcaccataatgacccatatatccccaaaatcacaggcttagatgagtggagtcaaacctatccaggctccatcatccattcatcttcttataggcgtcccgaatcatttgcaaacaaggtatgtacccaacccgccctctaaaacaaacaattactgactaaaaatagaaagtgattgtcgtcggacactctgcctctggtattgacatcgcgaaccaaatcggccgtgtatcaaaacacccgctgctgatttcggaacgcacggcaacaaatctctctccacaacaagccgccgttgcccaaagccttcctgaaatcagtctcctcagtgtcgaagatggccgtgtgcaatttgccaatggccatgaagagcgagatgttgatcacatcgtcttttgcacgggctaccacttctctattccatttttgtcaagtctccagccatctatcgttacagatggcgtgcgtccgcatcatttgtaccagcatgtgttttacagcaaagagcccaccctcgctttaatcgggtttccccagcggattgttccattccccttcagtcaggcgcaaggggcatgggtcgcgcgcgtcctggcaggacgactctcgctgccttccgaggctgaaatggagcggtggattggcgactgggtagtaactcgcggcgagggacgcggcttcaacacccttgcctttccgctcgatgcagactacatcaattcgctgtacgagttgagctcgcatgcagctcggaaggatgggttggagaatgatgggcgtggtaaaaggccgcccttctggggtgaaaaagagaagtggacgcgtgagagattcccgttgatcaaacaggcgtcgcaggtgcttggtagtcgacggggtgagataaaggctttggaagaccttggctttgacttcgagagggattatgttccagatgccgaggcgcgtttgtagactgtcttattgcctcagataaagatggactagctgttgaagctactccaatgaaccgatattagaaggggctagaaagatgtctcaaatgatgtcaagaaagacacaaaaataaccggtgcaaagacatagatcaaacgatataagaatcccgttagactctctagagttaacatagaaggtgcagcttgatcggaatcaggaaacgaaaaatataagtcccattcagagcatatcagatcctacgccacccagaaggttcatccaatgcgtctcgaatgcagtctcacccatattgtcatctgccggactcccaataccaacgcgagtagcaaaatttccactatcaggcaggaaattgaagctatgcatagtgagagattgagaaactcgtctctctgtcactttggacctcagaggccagatgtaaaagcttgcctcgcccatggtttgcctcagcaatacagccaagtcatcctgtattgattgcagtcccaattcagtatccagactcgaattgggcatcacagaagacccagataattgtctgcgtggaattaagggactcttctgctttgttgtaatatccgcgaggcgcctcaaaatccgagaggcttcatgtgcagcatgccaagaggaaggaaatagttcaaacagcgtcacgagaagatcaatctccggaatgtcgtcaaaggctgcccaccgagcagtacagtaaaggaaaattgctgccaatgaaaggaggcgacagagggtaatccaattcatgggtagatgtcggtgttcatgcaggattagactcagctgtatgtactgctgcgcagcagccttgaggctcggcaggttttcttcggttgtgtctccctgtgcaggagtgtacaacagaagaagcaagttttggtagcggacattgagccatgttatggtagtatgaaagggaagctgatcctgttctgataaagtagaacttgataatagacatccctgtgtataccaatcttcgatttggaggcgtaggtcctgcggacgcatagaaggatgtggatcgtaaatggcattgacaatgcgtgtttcgaggcgtcgtagagagatcacatgccggctgacttgtagcgctatcgcgtactgatgtccttcttcggaaccatattcatgtatcataatacttggcagcggtatccgcattatactgtcagggaaggcaaatggaagtccatacgatatgctgatcatgcgagtgaacacatacactgaccaacccagccgacgacgtagctcaagtacccgaggcgagaggctctgattggtaggagtttcgttcatcagtccgactgctagagcatgactggtcagaacgccggtaatggctcgagggtcctggtcgcagggtacgaagaggagatacaagccgaggaggagcaaggtgcccactgattgctcattcacttggcagacacactcgcagagcactcttttgagacacggctgaaaatcccgttcctcgatgctttgcacttctccagcccgctgcaggcttgtgaagccgatggccattatcatgtagagtcgggtgggcacagccgaccgggggagaaggccatcgtctgcttctttattggcgagtgtttcgaaatctcgaagaacaagttcgctgtcaagaaatgggtatgtccgatgaacgtgtcggaaataggcctgcaagcatttgcgacccgctgtaacggaaatgggcccgtcttcctcggctttggaagtatggctttcctcaaaagcactctcactgggctcgatttcactagcatcaagtgatgaagactgcatcggggtacccaaggctatatctcgcccggtctcgatgtcttccaccgatctaccggcggggagtgtttcattaacaagctggctcagccaaacaatgcgtgattgcaattctcgttcgcgcgtctgcggactcgcagagcgctccatcagagaacaaggtagccaagcaacaagacatggtttgcaagatccttcgtctgttctggtgcaccgcttcttttgctggcgacagcggcgacacgccggtaaagggggtttacggccgttggtatctgcgggtctaccccgggatcgtcgtgtctccggttttgaagaattgcgatggactcgaaagcgatggatggagccctccattattgccggatgaaaagggtcaatttcggggagacaccgtgataaccaacggagcacgccattctttcccgcaacgagaaatacccatcggtgccgcaccgcgttgtatattcaagaacatgatttctcgcaatgtattcatattttctttcattttattcttctccaataatttactcccatcatggtatctgaaaccgaggcggtggaaatctaccgcgacgccatcgtctttgacgggttgaacatcgccaactggtcgcgcgagatttttgaagcatggcaacagggcggcatcaccggagtttcatgcacatgcggtaccttggaagggttccgcggcgccattgccaacgtggtataatggaagaaatggttcgaggaacattccgacctcatcgtacaggcgcactcggtcagtgacatccgcgaagcaaagcgcaacggcaaaaaccgccgttctattgtcctggcaaaacacagccggcatcgaagatcaactagattacctacgtgtcttccgcgacttgggtgtgcgcaagatgcaactcacctacaacacacagaattactctggagcaggatataccgagattcgagactcgggtttgactagatttggtcgacaagttgttgatgaaatgggtcggttgggcatcgtggttgatttatcccatgttggtccggtgactagcgaagatgttatcgagtatgcgtctaagcccccttgcttcggccatgtgttgccaggtggacttcacgagcatccgcgtaacaagtcaaattatcttttgcggcttattgggaagaagggtggatttgttggaatcagtcaatttggaccgcatatggccaggggcaatgaatcgactatcgacgattatgttactgctgtggactttgttatcgatttgattggcgaggatctggtcggcgttggttcagatgctagtgagggacatgcccgacaagtgattttgtggcctggtgtaatctagataaaggttatgcgcgtcgcctcactccctggggaagccagacggctgtgaagcctctgggcccgttgaaggaacgcccagaactggccaaggctatggctcgggcaggctggtcgaaatcaaagatgcagaaggtgttaggggagaactggctggattatttggaacgcatcattggagagtgatgctacatatatttagtttaggtaaaggcaccggtttcagtcttcgatactcatttatcccgctacatcgatcctcaatgatgtatattcccaatggaaaagagtttgaatgctttaaagtattcctaaggtgtgataatgggcacgatagattggccaaaagatatgtagaacacacaaaggaatagaataacaaagatctaaaagtgtcactgttttataaacgcattgaaacacatcaagtatgaacaccccaacctcctccaccagggctattgatttgcataatctccccggcctgcagcgcgagtgcggctttcccagtaagagaaagtctctccaaagccgtcttttcttcgttccacttgaatgcatagttctttcccacagaaccaggttgaccaccgttcataccatacggagaaaacactcgccgatcactgagaatgctgaatttgagcggaattctagcctcgatttcacggaccgcaccattccctcctcgatactcgccatctccgccagtattggggttgatcgcatgtttgcgaataatgacaggggttcgcttctcaacaacctctgcatctgtaatcttcgtatttgtcgagtgcgcttggatggcatgttctccgtgccagccaggtccagcaccacaaccgcctcctacggtttcgccataattccaccctggttcaataatcccagtggcaggattcctccctcccatgccccagccgaagctgttcgcacagccggaaaacgccgcacagctctcgaatgctcgcaagattgtgtcaattacacgctggcttgctagcgtactgccgcatatggccacggaggcgctgggtctcagaactgatcctttggggatgcgaatatctataggtgatagacagccatcattgagagggatatctgcatcaagcaggcaccggacgctgtagatcacggctgaatgggtgatggatatagggcagttatagtttccccacatctgaggaccagtccccgtgaaatcaaacactgccccgccagcttcatcgatcgagatagacacttttataacggtgccatcatcaaagtgatcactggcggtcaggggcatggtcctagtctgggaaacactcttaaggtattctctgactgctgtttcggaattcctttgaatagcattcatataacgatccacaaaagggaaagtgaattcggcacacatcttctgcaaaagaagaataccacgctggtttgccgaaatctgcgccttgatgtcggagatattatcgtccaatcgacgacttgggctgcacccagggagatcacccgcagccaagaaggcattgcgcacatccgtttcaaggaaaacaccattatccactattttcatcgagcgaacattgaacccttcttgccacagttccttggagtctggcatcatagatgtgattccttgtccacctatgtccgtatggtgaccacgagccgcaacatagaaagcaacggtggtctcgccgtccacaaagacgggagtgatgatagtcagatctggaagatgggttccaccgcattcagggtgattgctgagaagaacatcgccggccttcaactttccttcccatagacggtgctggtattggattgcatattgcatgcttccgaggtgaatggggatatgcggggcgttagctactaattttccctcccgtgaaaagatggcacacgagaaatccaggcgctcttttatgctggttgaaatagaggtgcgctgcagtgtgtagcccatttgctcggcgattgccatgaaccgatgagaaagaatggaaagctggattgggtcgatagtctcggactgagctacttcggtattggagggggttttagtctccgatttctcgaggaccaggtgatttgggaggaggaaggcatcaaaattagactccacgaatatcgtttgagtcgcatcaatcaacaaggcaggacctcggacctgagagggtcgccggattgaggcaagttcaaatatcggaacgttttgccactctgaatcgaaatatacagactgagttcgatcagcctgcagatagtcatttagagacttgacttgttctaactgcgaatatggtgataattcctcgatagcaacaccacttcggccaacaccacggaccttgatcgaatcgatctgtatttttctgtcgagaacgaatgcaaactctcgcagatgtgtggctataaatgaggctccataatcttcatccttaggtttgggcacgacaatgttggtgtctgtaccggtatatctcaaactcagggattcttcaaagacaacagtggatggatctgcgccctgtgagagaagggcagattcagcttgggatttcaggttgctgatatgagctcgaatgtcgtccagcactttgaaatcgaaggaaccaacaaaagggactgttttttcgacctgcagatcggcttgagaaattccgactgctgatagcagtgaagagtgtttgtggatgaggatccgcgtgataccgagtttgctagcaattgagcaagcatgctgacctccagcccctccaaaactgaccaacgtgtgactgcttggcgcgaatcctcgcacttctgttgcgttacgcattggtcgggtcatggtttcgtttgcgacatcgagaaatccgaatgccacctcctcgggtgtgagcttttgcccagtttgctcgttgatctcgcgagtgagttcatcaaacttttgtttggtaacatccagatcgagatgttggttcgcattcgggccaaagatacccggaaatgaagacaggaccagtcttcccaaaaacaaattggcgtctgtcacagtaagaggacctccttttcggtaacacgcaggaccagggtgtgcccctgcgctctcaggtccaacgacaaagagtccatggcgggcgaacagcatcgaacctccgccggccgcgaccgtcgcgatgttcagcatcggcgttgtgatctttcgaccccccaccgtcgtctccgtcagataatcgtattttccatcataccgacaaacatctgtgctggttcctcccatgtcaaacccaagaacaggagtcccttcggcagcatcaaagcaagttcgagcaatgcccacaacgcccccagctggtccgctgagaagagcttcatttccgcggaacttgtccgcttgtctcaagcctccgtcagatcccataaactccactcgctgaggaagtacactaaagccggtctggaacgccttaatataatcccgcacgattgggtacaagtatgcctctgatgaagccgaactgctgcgttgcaagaatttgatgacagggctgacttcggaagctttgatcacagtttcaaagcccatatcttgcgcgatgtcggctacctggtcctcatggccagaatacagataggaatgcataaaagagatgaccaaagatgtatagcctgcagactgcagcccgctcagcacttctcgaacctcaacgggatcaagtgctttcaacacccttatcacctccccactgggtgttcggaccagtgcaggatctgtgagtttggccgctttatctgaaggaaatggattaagatcatagtcctcgatagtgatgcgttcgtcaatttcgaccgaagttgaatgcagcgcaggaggctttctgacgttcaaggcaaatagcttcggtcgagtttgatcatcgatgacacagacatctttgaagcctttggtggtgacaaatgcgaaatctcggcctttgccttcaagcaacgcattggtcgctatggttgtcccaatacggcaggaggctattcgggacccgtctagcttttcacccactggtatttggcggttttcgataatctctagtgcccttcgaatcgcctctgttggggcgtcacggtagttctgcggatcttccgacagcaatttgaacacaaggtcatcacgaccggggatttgaaccaggacatcgcagaacgtgccgccgcgatcttggccgtttagtatggtttctttaatcgggagcggtatagagtcacgtaccgatggagatgtttatgcctggggcagtcgtcatggtggctgactatgtgcgatttgacaaagagctctgtcgcaaacgtcgccaaaatcaattggtctttaacattccgattgaatattgatatcgctggtggtcggcactaaaatcacgcgttatctcgtggttttgaggtgatttccccactcaagtctaggagtggatattattttcggaggttggccgacgtctaagagcaaatctggttcactatgccgcagtgtctaacagtaacgccatctccaatttgccactgtccactatttacatgtccacggttgaaaaatcagctatgcgaattcatcggagtctctactaggtagtgacaaaatatcttcacagaggttaggtatgcacgagactttcaaccctctagaaagactgttatcaggcgccaatgaaaggaatgtcgggagagcttcagatacgatacaatatatcatagaacatagatatcttcattcagtggtcctatctctttaaagcatcaaccttgctaaaacataccggctccaaaagaaggcttacgaaagatgtttctcaatgagtccgatcacctccgcattcttctctagatgcacgctgtgattggcattttcaataaccttcagctgcgctcctggaatcctcgaagcgatatccttggactgttccggtgggcaaatccaatcgcgctcacccacaataaccaaagctttcgccgtgatcaatggaagttggtccctataatcgaagaatttctcctgcttggaatagaggtcatctttgcgcggtcagctttattctgtttggaggttgagaaaaactcactgtgggactttgcataaaagacggtctcgatgttgtgcttcaacgcgagatccgggtcaaagttctcgctatatagcggtgcagccgcgtacatgacaagtcgaaattccagatcgctctcaaattgaccgaatatcttatctttcaggaaattgatggaaagatttggggctctagatgccctttgttccagagtacggatagccgtttcttcatcttgtaaaagttagaaaagacgtcggatgttgcacgaaacttatagtaacactttagtagcacttacggtgatgtgaaggagcagttcctcgaagaatcaaatgggaaacctgagacggatatgtgattgcatactgctgggctagaaatcccccaaaactaccaccacatatgatacagggttgattaggtccaagaaaatggcgccttaaaccttcaatatcttcaacgacttgatgaaatgtgaaaggctctgttcgtgaactttgaccatgtcctcggaagtcgaaagaaagtactcgatacgaggacgaaagggatgagtatgctttgtaatctgacttatggtcgcctgttacattttatcagtgaccttagaacgtttgattcataggagtagactagaggctaaccaaaacctcgcccaccgtgtagagtgattatcaacggtgcatctgcaggtccgattaatcggtatgctaactgggcgccattgatagagacgtattcaaccattgtgtgttatagcaaatgtaagaatggaggtagtgaaatgagataggaatgatcaaactgaaaatcaatcatagataatagataatagtcgaaataggaaattgagccgaagccggggagaagtccaacgccaagattgccaagcttatctcgtggtgtcggccccgctccgagaaatatttctgtaagaggaagatttgagcggatcggccattctatctcatctttggcacggagtccacgcaacaattagtttaaatgtcgtgataaggttgtatatgctttttttgttgcagttgttctagaatatacaaagtactagtacattaaaactcctctctcccttattataaatgatcttctcgtcacaaaaggaggatctgaaatcctttttgactcgtcggacgtttgtctcacaaatccacaatgactaaaccagtcgaagagatcggggttcaaaagccaatttcaactcctaaagaattggacagcgaccactcagaattacaacaagaccgccatagccaaacggattcatgtcagaatcagtctgaaccccccaaaggttggttccactggcatgagcccggcacttcaaaggccgacaaaaaactcattttcaaactcgactggttccttctgagctacagctgtctgtgctttttcatcaagcagttagatggaaacaatatatccaatgcctatgtctccggcatgcaagaggagcttgggtttggaccaggaaacgaactcagctggatgaacacctattttaacattggcgcgattgtcggagggccaatctcaaacatggccttgaccatgatccgaccgcgatactggctgcctggctgtctgcttacctggtcgctcttcgtactgttcttgtacaaatgcaacaatgcatccgcgttctacggtcttcggttctgtattgggttcttcgagtccgccgcctggcctggaatccagtacgtccttggatgttggtatcgccgatctgaactcgcgcgccgaagtggtctcttcgtcgtgtccggtgtcctgggacagatgttctcgggctacctgcaagcagcactgttcaaagacatggatgggaaagctggattgtcggcgtggagatggcttttcatcttcgatttcatcctcgccatcccggtggttatctacggctttatattctaccccgatacgcctcacaacacgacggccttctatctctcggaatgggagaggaatcgcgctcgccagagaatcgacgaagaaggccgaactcccgttggcaaattggaccgctctgtcttcaagcgcatcttcttgtcatggcaattatatgctttttccgtcggatacgcattgtggtctctcacatgtggttcatacgtgatgcagttctttggcctttggcttaaatcgctaaagacatacaccgtccctgagattaacagcatccctacttccatgggagccatcaactttttcttcatgattggtacgggatatgtcgccgataaaattggccggcgaggacccgtctgtttcgcagtcgggtgtcttctgacattctgttttgctgttttcacggcttggccttcatcaaatgggttgaaaatggccgctttcattctttccggctgctacggatgttatacgcctctacttgctggttgggtcaatgcgtcatgcggtggagatcaacaactgcgagcatttgtcttggcgtttatggtcagtcttggatcggctgttgttattccattccagcagttgcagttccctagtggacaggcgccaaaattcaccaagacacacggctgggttagtgggctgtgttttgttgtggcattgagtctatggactggatttggaatcgagattgtcgaacggattatgacacgtgggaagcgcaaggagagcctacctaaggaggaagatgtatgatgctgttgagcatatggaatgttcatattgtgattcgtgagagatattttgttggttcagtaatatatatacatcctggactatttcaaaatctttatgactgacccgccccattgttgacttataagtccttttctttcaccttgccaagtttagaatcatcaaaaacccagcattaagtaatcctctatacaaaactatgttttatatagagtggtttgttactcttgcggtagaactatctgccctattacagccatcttatttagacctaacaagactacttcccatgatgggatgcagcgtttaaggcgatcccaatcgtacgttatgccattttcgtagctattgtctgcccactggtcgtatggacccgccgttattatgccacgtttctcgtctcaagggtggggctagaaccgaactagtgttgtcagagcctatataatgtctcagatgagagacccttctttcataaaacagctttttgatatatgacatctatgtgagtagaagtggctcattacgttataataagtcgtaaatagccaatttttgctggcaatgaaagtctatggactgcgatattcagatgaatccgagcacatatctatctgccgctcgagttcataattcaacccgtttctctagtgcctgactgccttcgatgaactaagtatagtgccgttctctttaggctcgagacgtcagtggaagtaggagaactcaggaagtacccgggatcggcatggtcggagaaggggccacatttctcaccacacataatggaagtagcggaggggctggattgcttgttcaccataaggcgatcggaagtgggttaaaatagctataaatagccagcgaaggaagagaaaaagctccgcaaagcttctatgccagtcgatgtacttcttaagaacgtacgacacggcattcacgagtggatccaaggaacccaagggacaaggccaaaactaaccaaacggacgtccggacaccaaccactgggattaacctcggcccaaagggccttaaatcgctgctatggctggcgttatcgggcgggcttgatagtagtggcgatagcggaggtagaattatatttcttacacgacacatcttgagatgtcgttgtggaatataatcttttcatctgctcgtgcaaaattgaagtatagaaaccacttcgggggagacacaaacgcaataggaccgaaatccctagtagtcgctataaaatgcgatgctgagccctgggcatcatcatgcgcgtcaggtaaataatagaagcaagtggcaattacgatttcaacttcagaaacgacctatagatataaataaccccgagtagcccaattaccgggcagtttgctccatccaccaaccaaacgccaaagcagaaaggatagtaaaacgcaggcgaaaagacagagaaaacagagacagaagtaaagtgaacagagttggattattaacaaatacagatccagaaaatagataggtgccatacgctcataatctggtatcacaagaacgtaaagaaaaggcaaaaaggaaatcataaaacagaagggattttacttgcttggtaaaccaaaagccaagcaagagttagagtactgacgccatgatgcacaggaggcaatctgtacctgtgcaaatgcaaatgtcataatgggacttccaaaattgaggagaatcagccccaaaatgtaaaagagcacgctccacacgtgtctagcggacttccaatggctcccatgtacaatggaccaaatccgaaaacacatttccgtccaaaatgaatcaccaaaaagtcactccgtggtccatcgcaaggacgtcaaatgctagaaccggaaagggaactggatggctagatgggcatatatataaaaaaaaagaataataaaacaaagcaggcttttaaaaagaaagaaggggggtgaagagggcaggtaaagacccggggaaagtccctagcggcgagtggcgatggcttgttgttgttctgggctaagacggtctcgcagaagcatcagtgggcgaccgggctcgagaagacccatcatcatcttgcctaattcgttgtgtttgatgggcttggtcacgtagtcattgaaacctgcgcgggcagcgttttcaatttgatctgtcattgcgtttgccgagagagccatgattggaatctgtggataatggttcttttgctcccattcacggatctctctacaggtatcgtagccattcttgataggcatctgaatatcgcactaccattcgatgcggttagttttgccggagggaaagggtataaagtcaggctcacgatgataagagaatagtatcccggctctttagaaagcaccatgttagtgcactccagtccattggatgcagtctccgacatcagcttgatcttgtccaaatacttcagcataacctatatatgagttagcaaccaattcaacgaggttctcatgaatcaacttacgtcgcgattggtttcgtcgtcttcgaccagcaggattcgataacccttgttgcctaaaacttctttgaccatcttagaaacggtcttgaagttgttattgatctcgcgcgccatgtcttggttgcgatccttgctcagctcacgcttgctcttgggatcaaagatcgttgagaaagcagaaggtttgataggcttcggcacaatgaaaacctgctttcctgaagctgctagctccttgacctgtgaactaatttgacgcttttggtaaaggtctgaaatgatgacgatgacgggcgcgggatttaagcccgggtctgacatgttttgaataacctccaagatatcatcagttgacagattcaagacaagatgtgtacaaggatgggcatcggaagtggactgcatcacatctttccattcgtcaacatcatgtaatgccgtgacctcgaacggaatctcatgagggacaatctgctcgatgtgctgctttatggcatgccgggagtttttgagcggacacagaattacgatcgagaaaggtccgtggacaggcgcagataccgggcctactggtgtatctggagaggcagattcaggtgacgctacgctgactggttcgtcgggctttgtaacggcaggttgggtccttgagctcgagactgcgtctgccagattcgtcaaatctgttgtctgctctaatggagaagacaggggtgcagggccaatatctggagtcgggagggcagaggatgtaactgataacgaggcagaaagtgtagtatcagagcttttgctggatgagtcggagtttcgggcggctagaggaggtgcttgtggataagaggtcgttctagactttgccggtcttcttgaagcgcctgaaccctggcgcatcaatttgggctgctcagagggggaaggtggcggaggcgcatcgaccttgacgttaaaagagaactttgctccctggccctctttgctgctgggagtgagctttccgccatgcatttcgacgagttgcttcgacaggaaaagcccgaggccgctaccagcatgttgctgtgtcccattttctccaagctgactgaatcgttgcataagtcgttccgcatcttgagagctgaacccctttccggtgtccacgacctcaaagttcatgtatgcctgggtgtcattgggattcgcagctggatcccgatacatgtcacagcagatgtgaatttcaccatgcgcagtgaatttgactgcatttccgagaagattgatcaggacttgacgaattcggaaccgatctccaatcaccattgatggcaagtctttgcctatgagatagttgatctcgagacccttatcgaccgctcgggaggcgatagtgtcgattacatcctcgatcattgatcggatatggaaccaagatttgaccattgtcatcttgccagcttcgacacgggaaacatcaaggatgttgtcaactaactcacgaaggttagtggagctgttttgaatggtatcaagcattcgcctctggtcactgtcaagctgcgtatcgagtatgaacggaattgtaccaagaatgccattcagcggggttcggatttcgtgggacatgttgctgaaaaactttgtcttggactccatttggtgattcaactgttgcatggccttgttgagttctctttcgaggtttttgcggtcgttgatgtcggtacatgttccgtaccaggaggcttcctcgctcccgaaactgctagtcttcacgcgtactacgcgaaccagatgccacctaaaatcaccacctcgagaacgaaggcggatctcggtagaatagaagactcggccattctcatcttgctgcaaagaagcaatgccgcgcctgacaagctcgtcaagagctgttccgaccatgaactcataaggcccgccatcacttcgttccgcgttctgagatgttttgttgagcgacagttcaccacacttttcgagatcgtcaggatgaacatgtttagcgaagccgaggtcatgcgcttcctcgagcggttggccggtgtacagattccactgctcgttgacaaatatcaatccgcggttctccgttgcctcaaacacaatctgtgggatcgaattggaaaatgcacgatactttgcatcaatcgcaaacttttccctctcttgagttgcctcaagctcagcaatatgctgctcatgaatgtcgagaaaagacccaatccagtaaagtacctctcctgttgacgatagcagcggattggcccggaatatgaaccagcgatatgctgattcatcgttgaaccttcggaccctcactctttcagtgaactgtgcccccgtgcgcagagcattggcccatttggtatgaacatgctcactctcgctactatgaatattttgccaaggatctctaaatttttgctcctggtgctgacttcgtctgtaagcatcaaacttggaatttgtccaaatcacttcgccactctcgggttttgccaggaataaatgcaaagggatcgaattaagcatcagctgtgctatcgtgtcagagaacgggcgcgggagctcccgttgtagttgggcgtacaacgagttcgtagaggcatgacgtgatgattgctgagtaggtgaaagaacattgggcggtctgatctcttgcagtggtgatgcgacgtagaacgattggtcttgtaggttggtctcatcgctggggattgatttccaggccactttttcgggagaaattgttgtccttgagtcgatattggtggtcttagatctgaaaagccgtggtctactctgcaatgcactgtcacggacacttttgttttgcgggacattgaagtagctgtcagcaccttctccgccctgtcgtgaagccactcctggggacggatttgcggacccgaatccaatattgccaagatcaaatcccggtgtcccaatggcagaaatagtaggactgaacttaacagacgaacgatcactagggctattggtacttgcggacgcggacattgggttgttgttgtcgccaacggagtagctgacgtgaccgcttagtcccgcaacaagctcaagctcactgcttgcatcggagaaagtgccgccgaggcctaaaagttgaccatagcgaggtgtttccatcttggatgagagttgtttttcaagctggctatatcgctgagccaagcagaaagaatttgtcaaatgcggcatcagaagcgagagtgattgtctgaggttaggaggatatggaacgattgtgcacaacattgacacaatggcaacgggaaatctcaccgtcgatgaggactcccggtgagagtgaccaccatgtaatagaggaatatggataacggtcttcgactgatcgatgccaatagcctcaagtggaagattattagagtagtcgtgcgaaggcggatgcttggagaaagctccttcatcgacggcatggcttgtgaagaacggattctgctctgcgtgcgtgcggggagcaggcgatggagcaggggactgagaccacggagactgcggaacctgctcatattcatcatattgcttcaagccatgggcaccgaagccttgctgcatcggtacattccccattccacagccaaccggaccatcaacgtcaggagtaacttggaccatctcatttggactgttggcggactcagtccaacgctgcggatattgcgcgctctctgcatactcacgtgttaagatagtgggacgggtacgcccaaataacttgaccacgcctgtacgcttgatgagaggatctagttctacctccaatggtctaggaatggggaacacagcctgccgcatattgccgaggagactattgagtgattcgtctttggcttcggagttctccgtccaatcatccgtggatggcgagtcttgagaagcgatatgtacgtgccttttctcgggcttgacatttatcttcgaaagttgtggtcggctggtagcgtgaggggtgtggccttggcctttatcaaacccagcgaatgagtggcgggataataaagatggtcgagaaggtccaggcattctagcctggtggacggtctcgggtttctgttgcgagacgcttttgcgcgagtggggtgcctcagttgatggtctcttctctatatgacgtgcttgaagttcatgcaacgaggtatccacgttctggttaaatatcgccttttggccccaaggtacgttctccaaatcggtcacatctccagggacagccagcgacacacgctcagccccgtaatgtgtttgcaatatattaatgaggttggtccaccacaattcgagtcccgaatccgcattcaactgaagtgtcaggtcataaagatcgggactggcaaaattcggatcttcctgcgtctggctatgatgagcgggcagaaaggtcggatgcggttccgacgcttttggttctgaaggtagagtttggtaccctggtgtcgaagaatggagtttctccgatggaagcttcagtctgaatggtccacgtcctatcgattcgattcccattttggatggtttggtctgtatgtgtggaaagggataggacggcgtgtatgctggtttgcgatcggagggtgtctctatctggacacctctgattgtccctgcggaacttaccgagcctgcggaggtatgtgagctggtgaatggggcttccgttgaggtattagacaatgcacttgacaaacgtctctttcttggggtatcattcgagggggcggaggcgggctgattctgagatgagactggttgggtttgctgcatctgttgatatacaaggagatcttccatctgctttcgcagttccttgagggtatgtgaactgcgtccttgatcctcctgtcgttcgacttccgatcgtgcgtcctcggtgatgggtgttagaccaacaacctgctccgtagaatcgccgcgcgacaaacgagacgggttgagagacgacttctcaagagcatctaccctatccgcaagttcatccaccaatttttgcgactggtgaccatgtgggggacggtgaccaggcgatctgagaggttgcatagacactgccgatggatgtgtctctgatggcgaagggaatggagaactcctcctactatacacatcctccattctcacgcctccgcgagtggagggaaagggtataagagggtatcaatggtagtgtgcgaggtacgggaccgaacgatgtgagacgtttatggcttgaccgaagtcgcaaatgggagatcgggtattggtgggtggggtggtaaggacgccaaaggaaataaaacagattatgccaagattagaatctgaaggtgagagtcgggtcgatttagaataatagaagaatgaagacgacgaagacgaagacgaataaggttgaggcggtgtatcgaaggggggcgaccgatattgaggtgttcgagcgagaaaggaacaatttaggaaacaggcgtacccgccaggcccattgcttgcatcgatatgggagtggatgggagtggatgaagggaagaaaaagtggactgggggcgtgatgatgcaccggggggggggggggggtnnnnnnnnnnnnnnnnnnnnnnnnnnnnnnnnnnnnnnnnnnnnnnnnnnnnnnnnnnnnnnnnnnnnnnnnnnnnnnnnnnnnnnnnnnnnnnnnnnnnnnnnnnnnnnnngggggggtggagggggggggggggggggggggggactaatgacgtaggaaaaataaaaacttggtggcttttttcttataaacggttatttccttcatatggtttgcagataattatattccataatgtgtcttgcagtgttcgaaagctgaccttttcagttactttgatttcctcattctcatagatattggaagtcgaccctgttcttcagccaaaaaaagccgatatgacgtagccctagttgtacctggattaccgggattgcggtaaacggcagccaagtccaagtctctctcccttagtccttattacctgggaaacttgaaatatttatgaactacttgtattttatgaactatttgcaggctaggcaagctaggcatccgcaggacccaatgggcatatctatggggtatttgggtgtctgccctaatagaatcacattcaaaaagcgactcgtggaacatccaaatcaaaggagaagctcttgcggtctagaccagagaattcaaaccccttatcccccttgatcagcctctgatttatggggaatggggtatcatacatagaggtcggatgcattgtcacgccttgttgcagatgcctaaccctgggaacgagaagatcgacccgccgacgtcaacggggctcctgtggcgccaaatcggctcgatgggggaaggattagtgcatggacggtcaagctccccttttccggaggatattctattcacgaaataactaatctggggtctacaatactttaatttgatatatattgggagtaatattgcagatttggcaattctcagatggtcagctgagattctcctgtcctatttagaataatacacacattccgttcttcagggctggctcccgtatctgcagtctagactctctaactactatatgcagttaccccgtgcggcgctataactagccggtttcatatatgttctagttaactataaatcctgaaatctctgttcttccaccgtggtagaattttacagtagctattattaggccaaacccatttgaagttgagatttagtgaaatgtacttcccgacagtcgagtaatgtccagtgtgacctaagttcaagtgcatgcgagtctccaggactacaatcagtgcttatgaaaatataacaacccatataaaaagccacaacgccatgcaatcatatccttatttaccagagagttccgggaattccgactccaagtccaagtccacggactgtacaggctctcggttatcgctgccgacatcggaggactcatccaaaccactccgaggattcaactccctttgataaatcggctgttcgatatccttcaaacccgaccccgtggggtctctccgaatgaggaagccctgcacgcgcgcatcatttgaattcatctgtttgacggtgctgtctctacggtcccgtaggacgcgcgccgacttctcgttaacctcacgtagtcgatcagtgtagccagaattcatctggctgatccaggatgcttgaagggcgcccgcaaacagcaccaagaggattacaagccgagagaaggtgcgctggtcgacaacatgctgctgcggcccttggtggcggttatgccagtcctcccaatcttcccatgtggcattcgcgtagatattcgggccatgggagttgcggtccattgtagtatccagtcccgcgtggatccagccagtgccatttcgatcataggccgctcgtttgatcggatcagaaaggagatcatgtgcatcaaccacaattcggtagcgctgcaatcggctttcagcggttaattgattgaagagaggatggtcatggagaggtcggtcggggtggtagatcttaacgaggtcatagtaatttcttttcgaatacttcccggtgcggggtaaattcaagacatcatagggggtgaaagatggattgctcggccatgagtagttctggtgtgggaactctgttgcggtggcatagttcctgcttttgtatggtgcctgcagtctatagcttggagagattctggtcttgaaacgaggaagcggtaagaccgtagtcgagttcaaaagtcgcaggctttcgccaagaaaaggattgatcgtcttgaacattttcacatggtgtcactttaatgttcacgtcgaaatctccgttgcgctgatgtcgtaagttatcgtgagggtcaagtggagtggcggcttcggggctggtcacgtgtatgtagtttttggagcttaaccaaagatctccaactttttgatctacgcttgtctttttctacagtcacattgcaacagcaacaatggccgagtccaacgacgaccgcgtcgaacgctgccggcgctccacgaactcaccctcggatcagacccatgaacgccggcgacgagatgcgccccgagacgactattcgcgttcaagacgacgtggtgaagaccgccggaactctcgtcaggacagccctcgacggagatcatcccgtagtccatctgaaaggaccagcgtccgaagtgatcgtgctcgtgatcggcctcgtcgcgagcgcagagagcgatcaacaagctcagctggcgaagaccgccgcagacacagacaccgcagccatcgataccgtgacacccgccacgaagacgaaggacgagtgtctcgaaggcatcgagatgcgcgatcacgctctcgctcaccgcgaaaatcacgcagcccctcaccgcgagcattggaacgacgcggccccctcccctcacagtccgacgcattcaccgacgtggcaaacccttcagatgcaccagcgccagaaaaacaaaagccaaacttcaacgctactgggaggctcgcagccgaaagcaatacaattgtccagggtggtacgaaaatagtcttgaaataccatgagcctccagaggcgcgcaagccgcccgccaaggaagcctggcgcatgtatgtgttcaaaggacaagacttgctagaaacggttgaattgagtgaacgcagttgctggctggtcggtcgcgagcgactggtggtagacttcccactcgaccatcccagctgctcgaagcagcatgcggtgctacaattccgatttgttgaaaagcgcaatgaatacggtgatcgcatcggcaaggtcaagccttatcttattgatcttgagagttcgaatggatcgagcgttaatggagagaccatccctggtggtcgctacgtggaagtcatggacaaggacgtaattcgcttcggcctgagctcgcgcgaatacgtcctcatgctgcctcccagttgagtggagctttcagtttggtttaaagcattaaagcgctacgggtacaacatgttcgatgaacggaatatgacaataatattacaagtcggatcataattgctgcaagcttaacctagtttttgcgggcagacaaggtcaaaatcttaatcaatgcggcacttggcctccttcactacccttccatctggcccatcgcctactttctcagtgcttcttctgccttgctcttgcccttgtctgcatactgggccgcctcgcccttcacctcttctcccttttcctttgcttgcttagccccgccgctaacagcatccttaagcttgtgggcggctttctctgtgggcaaattcatgttagcatcagtctctgcacattgaatcaaagtcatatagatcaatgagatcacattgaagacataccacccgtgttgatgcccttgactgctgcatcagaaacagtccggtcggctttcttcaatgtctcctttgtcgcatcaacaggtcccttgttgcatggtgccgtagctgagatggagcgaatggcctggaagccaggtgcggtctgtaccgccacccgggttctgaggagaggagcgaatcgtgctgcagacatgtttgtagtgtgatggaagtttccgataacgtgggaaattggaataattgatgaaatctttattgattttcccccggatcagtacaaagtaacttgtttaaataggtttggagctttgaaatgtacttgatttctacttggtcgcccccagctgttagttgggttggagacgtcatgagtatgtagcccagctcttacgtcgattgacagtcagttggtcctccaaacaggttatgtattccgtttgattcggtgactggatttcatacctgcataaatccggttttgagtatgtcatttttgtcattcgttgatcgacgccgttgaatgtgggggacagcgacccacatgtagagaacctcaattactaccggggaacaagaatttgctaaggatcacaacgattgaacaatatatctataactagtgttgcaactctcctattctaaatcacggaaaaatatgttggcgatgctcatcatcgtcacccgggaaacctggacggtgtatccaagagacggatatctgcatgtaggtcatagctagcttttaacagaacgcagactaatatcgaacttgagctcagaatatactccgtgtggctacagtacctgactcgaaaaagcatatatatcacccgtagacaagtatatagatcctgagatactccgaaatatataaccgacccaagctgaacttcttccgcgtcccggaaccaaggtatcctggttatatttcgccacacctagttcaagtctatacgcgataatatataatcgaaaactacggccgaagctcaatgatgggtgttagatgaaacttgaatctatctatatcttgcatttctttcagaggatggcccacttttaccgttaacgttgagcgctcgataaacaggtcttgtcacgcagagtatgcctggtaattatttaggactatgcttccatatgccaggatctctgttgggatattatacgattgtctcaagatccagcgcaaaccaaagttggtcaagactcggagtctcgtgatactgaggagcatagtatagacgcgtctctgtcctcatatatatcacagttgaattaaagaaaaccccattggggtagggtcttacgatatggaccacttaataagagcctttattggcgattagtctcattcaatgagccaagctaacagttgccaacatcaaaagggcaagagagttaacttgctttgtcccacccgacctgatatgcaagtatacaccgtagtgcgaccctgggatccaaactgtcggcaaagcatcaaatcaattacaagccatggaagatatcgaattgatatacagatgcataaatatagatttattcaatatcaagggcataatatgaaagcttactggttcttctggaaacaaatctcgggaatagatatatctataggcatatacaaatcaattcgcactatacgaatatattcaaggtggaaacttgcagataagttgcagatagcagagacacgttagatatagcctatgaatttgatagtcagagagttctatagtatgatagagaatatcaaacacgaactatgagcagatgtaaacaaagttccaaccttggaagtacccaatcgggggaaaaccaactggaaggtttctgtcgatgctcttcacctaaagttttatcttctccctctaccctttccatccactctttctcttgacacaccatcaaaacaacaaagatatttcttttttgccttctttttctgtactctggaccaacttgatccatttctggttgtacttcattacaaagtcactcactacaaatggtgtccgcagccaaccccagtcgcgttgacccctccgagaaagaggaggagaaagcattgaccaacgatgtttcccttaagcaggaaagcgttgcgatcaatgccgagcaagcagacgagcccaccgcgcgtgaagtgaccgagcgtccaactggtcccaaattggctttgattacactggcattgtgtctaggagtattcctagttgctcttggtacatttacactctcagtgcagggcatgactgacgcatattatcttgccctatagacaacagcatcatcgccacagcaatcccaaagatcacaggccaattccacagtcttaatgatgttggatggtatggaagtggttcgttaaagcacgaggcaacctagctcatcggtgtggactgatctttttctctcttttccagcttaccttctcaccacggcgtcactccagctacttttcggaaagttctacacttttttcaatgtcaaatggacctaccttgctgccattggcattttcgagctgggcagtctgatctgcggcgtggccaacagcagtctgacgcttatcatgggccgtgctgttgctggtattggatctgcaggcattttctccggctcgctcatcatggtggctcactcggtggcacttgagaagcgcccgttatacaatggctgtatcggtagcatgttcggcatttcatccgtcgctgggcctctgctcggtggggtattcactgataaagtgacatggcgctggtgcttttacatcaatctccctatcggagctgtcactgttttggtgattgcaatctttttctctgcgcccatccacaatgttaaacaaactacatgggtagagcgcattaagaagtttgacccaatgggtacagctcttttcctccctgccattgtctgcttgttgctagctctgcagtggggtggtagtatctatgcttggaatagctggcgtatcattgtgctgttttgctttttcgctgttctcattctcctgtttgtatttgtccagcacacacagcaagacaatgctacagtaccgccacgcattttcttccgccgcactatttggaccgctgccctgtacagtttcagtctcggcgctgcgttcctctcctctgtctacttcttacctatctggttccaagccgtgaaaaatgctagccctgtcagctcaggtatcatgaatcttcccatgctgatctctgttgtggtcgcctccattttatcaggaatcattatcaccttcgtcggttactacacgccatttatgattgccggtacagttcttctcgctatcggctatggtctcatgagcatgttccacacagacacatccaaagctgtctggatcggctatcagataattgcgggcgccggtgccggtttgggtatgcagcaatctatgatcgctgttcaggttgtccttgatattcctgatatacccactggaacagctatcatcgtgttcgcccagactcttggaggtgctctctttgtttctattggaaacaacgttttcagaaacaagctcattgagtatcttgccaagtacacccccaacttgaacccagcttcgattctcaataccggcgctactggcttgcagagtgtggttagcaaggctgacctacctggagtcctccttgcttacaataacgcaattacccagacattcatggtcggtgcagctgtggcggccgccagcatgatcggcgctttgggtgtggagtggaagagcgtgaagggaaagaatcttgctccgggagccgcataattttctgacaacttcttccagcttttttatgttagcgctttgaatttcttttaacggcatataacatatgtaactcgttttattgagatatcaaatgccaattctccttatcagccagtgataaccctaaactgccacccgtggacctcggggacctgcgcagctaacccaagacgtcctagcgtcctgttaaccccagataagcagcggagaacatcgttgacttcacaatatcttatgattctaggaatactgggggacaatctactccatgaggatgccgaccaagcgacggattttgtcgtgccagccgtgtcggcgcttgaagacacgatgcgaggttcttccaggttcgagacaatgtgctcggtgcatctctctaaggtcggcggccgaatataattcatcaacaactgttggggattaatctgacaccaaataggctcgaatgctctcttccgtccacatctgccatcactagcccagattcagggtctattgggagatcagataggaattccgcccagcctattgcatgccattgcgcagcccggtatttctaattacacttgtatagaccgaggctctaattactaactgaaaggtaccagtcttgatgccatcgaaacctcactctctgagatgaaagaattactgaaatcccaccttctcggcaatgaccggtcaatggcacgacatcctgccaatgagatgcgggaaacgagcagtaatctaaacccgagaaaagatatcaacgatagcaaagccactatgcacgtgccatcagaggcagatatatcggcaaccaccgacatccagccagcaccaatcacagtggtccgccatgttggaagtctaatcaccgagcccgtaacaaccggggaaaacgactccctccgaggaaatatgaccgaaatgggcttggactcggacagcttctccagtgttttccagcacggcttcgagcagatagcatcctggtacccatttccgaatgaaaccctgacggacctcaaacagaaccatcctctgctctttgccatgtgccttctagcaggtatccgcgcaacggctggcctaaatcgcacaaacttgcacataacccttcatacattggtcaagacccacttgggcatgaaaactctagatacgcccattgatctctccaccatacatgctatgcttatcttcagtgcctggagcttcgggcctctcgtgccaggtggtagatatattgatagctggctgatgagcagtacgactatcacccactgcatgctcagctttcctctatccgagcttgtgtctctcgtgggtttgtacgatgaaacaaatcggaacatgtgcaggatgtggattcaggcctcactagtgcacctgaagtacgtactctgcaaatttacaatggtaagcccttctaaaatggcaacagagctgactagggttcaagatatgcaattggcaccggtcggccatcagtggtcccatgcgagcgtcttcaccagtggacggagatcgtcaaataccccggatttgaaacattcgaccacatcattgccgcagagctcaagctctacatccacctgtacgaagcgatttatcacacggtcagttcagtgaccgaggcgtgggacatggtcaacagatggggccgcaaatatctcggaggtgagcaggtcaagttaagcgtgatgcggctatattcatattctgacattcaaaacacagacggcagcaatatactaagatgggcacactcttgcgtatctctcattttatctcgatgggagctagcaaagcagaatcagtccacatctcccgactcgctgatgcgcactgagcgtattaacgagctgaccgaaacggtcatccgtcatgctcagctggtactgagagagattctggtcctctgcacctccgacaccgcgtttgttagaccgacatacgactatctgcttaccgcatatgcgggcgtcactctagcagagtactgctcgagtatatcggacgtgcacgcaacatatacgttgatggaagatgtgcggacgcaggctagaattcccaagagcattgagggggtatttagttgggcaacgaatgtcgtgcagaagaaggcgaaggatcttttggattcgaaagtggcagtaattcccgatgacaccttttattcgtaccccggctcggtcgctgactgggcgccgttccggtttattgactcgatgcctgcttctgaatgggacgggatgaatggctctatgcaacacttttgaactttatagaagcgacttgtctattatttgacggtgaattaaattgaaatacacctttctctgagtaaatcatttcttcaagcagaaatgggctttccatgtgcgagttcaattcggtttcgatgccactagacgtacaagttaggcacatccagtacgggacgatatggatgcggatgagacgtacttttccgcaagagataggctcataaagcgcaggatgagtctcatcaatacacgagggcacaaccttacaaaccgtatccggattgaagcccaggaagaaaggcatcgagtacctagaagtaggctggcgattatagaccctatgcactgtagacttgaacctattattagaaagacgctgcaggaagtcgccaatattaaccacgagcgtgcccggtataggcctcgcatcgagccactcatcactagcagacaagacctgcaaaccgccagacatatcctgccacagaagagtgacacattggatatcggtatgcgagccgatgccgacatcaacattcgcattgttctcctcgagtgtattggctggtgcaggggggtagtgtatgtaaagcccgtctgcgccggggctcgtggtcaccgcatcgaagtagtcttctggcatgtctagagcgagagcgaagatacggattatcttgcgcgcgagcatgaggcgacgctggtagaattcaattgttgtttcgtggaaccccgggagatggctggttgtatcccatgcgaaggcatcctcgatagacagcgcgtccgggtcagagacggttggatcgttcttaggattgtagcgcagagagaatgactctttgtgatctgcggatgtcctttgtcagtcattggccataactatgacgaagatctctcgggtggggctgatagtgtttaccccttgtttcggttttgttaatttgggtagtccccaacccatgccatccatctgtgttgttttggatcttgcttgatgctagctgtttcttttcgatcggctggtcgaagaaagcttttgcttgggaaagggcattctcaataagctcttcggagatgccgtgatttttgatatagaagaaccccgtgctttcggccgctaccctgaccttggacgcgatggtcttcctcgcttccaaatccttgtcgatactagcgagatctatgataggaatctcatcctcagttggtgggcgcggaggagcagttgacactcggcggaattcggggccgctgagggtcaggagttcgacttgggtgtactcgagcagggttgtcatggttagtgcgacatatggccattaccgactcgacgatgctggtgcatttatccatgcctgttcttgtcttctccccgcactatcccctccagggtccagaggtcgaatccaccgataaccgtcggagaaacagacggcaatcgtcggactatcttggcgcacatgcctgtgtggttggttggaagataagccgagataggctcgcacttgggttacttggcttttgtttctgagatagcatcgccaaggacggagttgcttctctgcttgttcatgggtgttttgtaggttgccagtggacaagtgcggatgactccttatcagtccattggtcactccgaatggctaaataaccctaagaaagcacgatatatcctgcacgtactcctcagttctcatctcctcccccctttcttcaagtttcagagttcgccagtaaggtcagcactcaaagtcaaccatctttactttgacccttttctccactctatctctaccccaccaacccaataacaacctcaataatgtccaaactatcgcgactccatgagctcttactagtgaaaagaacccagcgggatggcatcgagcgccccgttgatatgctggataatgactctatccgaccgacttcagtaaaggatcgaacatggtcccaactcacctatatcatgttctggttctcggcgactgcgaacgtcagcaatctgtacacagcgtccacgggaatggccatgggattgaccatgtgggaagcgatcggatgctcgttcggtggtcagatcctcgccggtgccttgatggctgtgaacggccgtgctggcgccatgtaccgcattccgttccccgttctatgtcgctccagctttgggcattggggagcactgtggccgactttcaatcgggcggtcatgtcaattgtgtggaacggtgtcaataccgttcaaggaggacaatgtttatagtgagtctttttttttcttagtctcgttctttccctggtgagggaagcactgaccgtgtggttgttgactttcgtttctagtgtctttctccatgcgattttcccttctattgaaaacatcccggataagatgggatccaagtcggctttgacttcagcacaaatgatgtgtttcttcatctattggtacagtggctagtatctcaatgcttgatctactgctaactagtctccacaggcttgtcaattgcgcattcttagtggtgcctgtaccaagaatgaaatccctggtctacatcaaagtcgtcgtttacttcggcgcagcatttgctatgctgggatggactgtgtctctcgccggtggttctttgaagacaatcaatgcgccctcggagataaagggcacggaaaaaagctatctcatttttaagttcctcttcttgggactcgcaagttgtggaactttcatctccaatgcgtccgatctccagcgatacgctacaaagcccaacgacgtcctcatcggccagattatcagctttccactgtcgaacttcctagttgccattctaggtaaccttatcgcgtcagctagcaaagctatctttggaaaggtttgtactatcaaaagccttgtttagaactaaggactgatgaaattctctagctcatctggaacccgctgcagttcttggacaaattgatggaaggagagcgatacacctctggcaaccgcacggcctgtgcttttatttctctggcattcgtgtattcgactgtcttctctgccatttttgagaactctatcccgtaagtatcaccttctcccacatttctatgccatatactaacaaccttcagtgcgggtaacgatattgcagccctactaccaaaatacatttcaataaaacgaggattcttcatctgcgccggtaagaaaagaaccaaagactcaaaaaattccattgcctcgacccaaaactaacaaccaaacctactagtcctctcctacgcaatctgcccctggtatctcctcgcatcagcctcaattttcatcacattcctctcctcctaccaaatctttctctcagcaatcaccggcattctcatctgcgactactacctaatccgccgagggctactcaacattcccgccctatacatctcaagcccaagtccgtaccgatacttccacggattcaacccgcgagcattcttgacctacgttattgccattgcgccaaacttctacgggttccttttccagatgggcgtcaaggcgcctctaggtatcaagcgattctactatatcgcttaccctaccggtctcataatcgcttttgttgtttattacctgtcgtgtctggccttccccccgcctgatatgaagcaggcgtctggctggatggagcctaaggacttcgtggaggatcatgatgcttctggaagtgatgagtctactattgatgccgttgaccctgacttcgcggagaagggggctgttgcggttgctagaccagctggcgaaaagggttcgttctgatgagatatgtctcgctaggacttggggatgtgcatgttgcagcgggaagcatgattaatgatttggtgccatatttacttaatgtctacagtcacagcccatgtgcgcagtttgttcatcttatgatcaactgaaatgtattctctttgctactactgtttaggggacaaaacccgggctcaatttggctataaactatgcacagctaattatgcgtataattctactgatctagcaggtttatgaacgccaagaccataatttatgcaaacacatctcccatctgatgtagtcgaactacaatcttgatacaaagtatcgaagatagtaaatcaacccttccaatgaatctcctctaaattctatcttctaaactccgattgacgtcacgttcttaggtattacccaaacctcgaactaaaagaaactgagaaatgctaaggccacgcaaaaaaaagacagatgcaagattagcaagtataacagacaatgcacgcaacaaaataacaacatggtatgccaacaaaagaataaagacgaataaggataaaaaaagccaaaaccaaagcaaaccaaaatcaaacaccaatactaaaatacataaccattatgagaaccgcacatccaaaccagcatagtcaggttgcacaggggagcttccactacgcgcacgagtcccgtatgcctccagtcgcgaagccggcgcatagatttgtccctcatgctgaatcaaaggacccgacaagttgggatggtacggctgatactggtggggccgcggatgcaacagccgagccgattcatggagtcggagtcgtgcatcttgtacatcaacacggtgctcgccaaaatgcaaaaactgcactggctcgatctcctggttccagcccgagtcaggatgctccagtcgctcttccatggagccgaggtgtccgtgcgatgacgcgggcgggctgagggagatgggatctggctggagagcagcattgcctgccagaggtaattcggtccagctagtcccggtcaacatttgctgttgattttgcatgctcaatggtggatttaggatcatctcggcctgttggaaactcgggggatatcgcacgggttctgtggcccacgattgataagagtaggcggaagagtcacgcgacatcggctcgggaactgagcgctctggggctgaccccacgtgtactttggcattatatgatggcaaagctctgggcataattgcggatggatgagcaatggaagaaagagcccctggggaatttattgagcctggtgttaattgagacgattttctgcggtttggaagagaaacggagttgttctcatcgtatgggggcggcggtggatatggaaagaggaatggcacgcttgcagatagatttcgtggcacctccagatgtggcactgagccacgccgagagggagcctgggatccaggcgtggtatgtaaatctgccccgtgatggtgactgaacttattgaactcaggctcactgtaggttgaccgactcaggggctcggtgatcaaatcttcagacacatcatggtatagcggagatgtaaaggcgtagcccgcttggctgtcgagcgagtcagtggaatgttttatctgcaagtcatcattcaaataggctgaagcctgcgaaatgggaactgatgacgggcgcttcatcgtagactttacttctaacctccgtcgagttgccacattcgcatacgttggcatattctctttgttggatggtggagaggtgattgcaggctgcggaacgtcagcggacgcttgggaattgctagaccgacgcactgcagcaagtgcttgttcagcctccgaagctgacatcaaagtgccccccgtttcggcagatgttgtgcggcttgatgatccctttccttggatggaggacagtctgaccagtggggtatttaacttggtatctacaaagcgacgagggcctttgctgcgcctctttgtttgagtatcttgatttgacctttgctttgagtgtcgattgaccacatgccactccgctaagccggctgtttgtggaggactgaatgagggaggtgtcttgttaggtttctccgtggcttggctcgtttgcgacatggctgtcttaacttccccgtctgtttcataaccttcttcagattcgtatccagcttgcctgaagatatgtggagggaaaagctctaatctgaactggggaggtggtgtagctatatgctcaggcgttcccgctcgagatgattcaagatcactccagttgaaggtagagcggcgcgatgggccttcgtcggatgaatcgcggagggatgatgacgagctgcttgacctgtcgaaaaccgacttttgattccgtgtagagtattgcgaggagcttggagacacattatctatctctttgcttattatcttcatcaatcgtcgcaaggtctctcgtgtttcacgaacgatcagtggatggagattgatggctgctttctttggaaagagctcaagcagtcgtgaagcgtgagtttcgtactctcggtagtcccggacaaggccacagtcttcgtaatgagccattcgtcccatagcggcatcgtaggacgtaatgagaaaacgagtggcaacaatcagccaagtatcgaaaaaaccagggtcattcttgctcatgatgcctttgttctcctcgtccttgattcggagctcatcacgacagaacccctgcacgacactatggatcttgactacatcaaccacagatccaccccggtatatggagaaaaatccttcttgactgctctctgtcagggaatctgagagttcggaaacaagcttcacgtccttaggatcgctatcagagtgacgcaaagacgatctgtgctgaaagagatcggcatctgaaatccgttcaatcaaaccatagtgaatgagggttccaagagtagtatcgagatcaggatcttctccggattgggcgctggtctggatctctaagttcacggcggccatagccgctccaccgaggttcagaaggcccactggcacctggtggccaagaaacgagagaagattaatcaagtgcagcgcctgcttttgctgcaaccgaaacaagtcgttcatgatactcaagaaaggttctgcaagcttcttgtctgtcacctgagatctgacatgatacttttcaatcggtttacccgttgcattgagacggtgcccaattgcatgaattgccagaggtagacattcgtagttctcaactatctgggtagccttggccatttgctcgggtgtcggtcgtgtaattccaagatccttgaacagaagcttgcaagcgtcacccacttgcaaccgtgagatcatcaggcaatatggctcgtacagtcgtcgctttttgcgcagcgttttatcgaccgaggtgtatatgatactgcactgtttgctccagggcagaacctctctgaacttactgatatcgtcatcgcgctcgaaggtgacgccgtcgaagatgaggagccaatctttgcgtgtctgcagccagaggcggactgcattcacgtacttttcagtctcgtggtactcggggttcacggtcaccttctgctcaattagcgtggctgcttgtgcaatctcccaaaaacacttgtacgtcgattcacgggacttggcgtcaatccaaaatatgccacctgggtagcagtcacgttgagtaaaaacgtactgccgcgctagatgtgtctttccagagcctggaacgccggagattagtacggccattgtcttttccggacgcgccttggctttgaatagccggctgtgcagcacttcaagttctttcttcataccaaaaaaagtagagttaggatgaaagcctggaggtgtcacgaataggggcgtttctttggcgcagagttggaaaattccactgttccccagatcagatactggggaattccggccttctgtcgcagggccacgcggtagagataatatggattgttctaggatgaagtcagccagggtgtctctaaaagttgtgatgattctcatattgagaagatcggagatctgctagttgaggacatgagatgggagccttcctagtgacaaaaccaataaactaagtccaagaagggagagcacacagtgagttgtctgagaaagagtagagtggatttccaaatgtatctggccccttggctcggtagtgaatgggcaagtcatagagaagtaataggacaaacgtgagcaaactgagctcgaagtaaaaacaaataaaggcaaaggcaaaggcaaaatcaaaggcaaacgtggctcgctagaaatcttcatcgaataggaggctcctcaatctcatagtccctcaacgtaacggatacttccggtgcagggagaaggtatgaagccctaccggtttcgtttaaattaggcatgcttcgatttgccgtgtcatccacttttgctgtaatagtcagtattcaaaaacagacaaatcaaagaggtacactttttgagaaggacttaccgtcatagatctccctagccttggccttcttttcccggatgcgagatttcttctcttccgtccagcgctctgtaatcacagcaggggcctgacgtgagtatcgtagaatggcctctgccacaacttcataaccagccgcattgtcatcatcaaacttgcacatatggctgtggtcagcctcgatacccgcccgctcaacaccctccatgtacggcgcagctgagtgctcgtccacgatcacttcgcgggtaccatgtacatcagtggagcgtgtctcgtggaagaagtagatgtgaaatcggcctatgatatcagcgaaaaggctgttgatgtgctgcagtgtttcgttgttggctcgcagagctttgacaagctgcggagatgtctctatgaacttcttaggaagcacagcattgcaaatgttttgcaacaaaagaccccatttcgcaatatcggatccattgtggggtgtgccgagaaaaaggatgccaaaagtggaaacatagaccgaacgtagatgctctgtcttctcactcgagagactacgggagtaaatcagggcgcgcttcacaatcaacccccccagcgagtggcagatgaagattatcggacggttggagcagtctcgcagctagacaagaaaataatgtcagttctggagactccatatcagtggcaaggaagaaaaaggtggagatgtcaacctacatttcgattagcagcgagactggaagcaagagtctcagcatggctaacgactgaatcacgcgaagttccatctgtaaaggcagtgacgttggcattgtaaccgtaagtaagaattcggggacacagcgaggcaagcacgtctgggagaaggtcggtaggccagaagcaaccggtggtttggctggtccaagtgtcatgaggatggccgttgaggccgtgaacaaagacaatatcgattgtaggatggtcacgcggggtgtagatctgcgtcaagccaaagaccttgatggcctctggatcggcgatacgaggcttagacatggcaatggatgagacaatagcagagtcaaggtgctattgccgtaacatatgaagatgaaaagaaggggaaggagtgaagaatcagttcggactttggcttttataaacgtgatgcgggtgactggggtgagcgtgactgagggtaactggggtgatgtgcctcctctgacccaggtcacccggaccctttcagtcgatccatggggtttcggcatttatggattccgggtgacgggccgtacattattctctaccttttttgtgatgtcttgggtcttgcctattggtagttcaacccggggtttcttgcacagccctgtcagatcgggtaatctgccaggtaccgtgccactcagacctcgaggtacttttattcatagatattgcattttgcatcttgcatcattgctgagtatgccttgtttggggtatgctgccttaaagtgttcagtttaggatctcgttaccctgtttatattgtagcctattaatgactagggtgagaactatagagtatagacgagccctatagatattcaggcagaagtctaaatagaacaaccacggaaataaaagatatcagatccgatatacaagacaaccatcgtgaactttgactgattatgtaggatagtactaacaatgtagaatagtaacaatgtaggatagcactaacagtgtaggacagcgctaataatgcaggacagcgctaatagtgtaggaaagcactaacaacgatgatctacgagacatagtagttccagtgcgccaccgactcatccctccggttcccacgcctctaaaccactggaagtcgagtaacaatgccaattttcttttctgtgaaatgtacagcctattgttcccaggcgcagttgcaaagtataggtagttccgcatggcctcaccagatagcctgacagctcctggttcttcagccttgattatggccgtttcagaaaaccaaggagtgatctgcaatccgttttcatctataatttgaagttcaatcaaggccatgtcgcattgcatcgacccgaaagcaagctcgacagaggctcctccaaggaacccattatagcccagctgatcacattgtaacgcactcaagtcggtatcaaagagtgtctgcacattactaccggtatcgttggcgatagggacatcgatagttaggtttggattgccgccaaacaacgccgggagtctaacccttgcaaaaagctaataaatcagctaaagtagatattagtaaatatatagtatacctgatgcatagcattcccgggataaaacccataagaggtcgactgcgccatctgcactagtgccggctaggtattatagatcaatgatcaatcctaggccactatagtaccttattgttttgaggtagttacctggggaggactctgctgcatcaactgatggaaaattccctagagtggtcaggaattattaaaatgtaacgaaggtagaaggtagagactaacctcggcccatacagcagaatgtaccataattggcggaaggtcattaaggcgaggcggcggatccatgatctgccccttgcagatccagatcgtctgctgagtcctgaccgggaaagacgagcggcccgagttccccagtctcatacattcggatgagtccttcaatattggttctctggcgttgtattttgggggtcggatcttccaggaatttcttgagctgctcaatccgttgctcaggcttgatgactaggggattcggacagaatgggcgtggattgaatgggcgtgggctggcatcctcttgttgcgccattttgaagacttgataaccgaggagttaagtaattctattcttggggaatagactgaagagggtatcaaaaagtgtagagggaaagatagagttaagagctggcccctcttttgttacataaacggcacgtgataactaactaactaactgagctttttccgtaacaccaacgcacgtacgtacgaccctgtgatttatacttgcttcgcttcgctccgcaatcaccatttcctacttgcagtcatcaaaatctttctttcgcctcacatgttacttctatcgcattgcccgcatgatcagaatcatccctggatgtccacatgatgtcttggtacgtacataccactcacctcacgtagtctactcggtctatttagtctatttgaatccgttttacttcttccaagctcgcaatagaaagaatctaaacatgaaatttcatagaattacaggacctgtcattttgataatatagtttacctagttaagtagaccatcttgttctacatatatcacccactcatccacacagaccattacctcccacggaacgccggcttccgcttctcaacaaaggcgcgcagcgcttcataccgatcatcagtctcaatgactccctcataggccgcattctccgaccgctcacccagaccatgggcctcgacagcctgcatcgccatcttgatagcaatagggccaccctcacagatatccagtgcgagcttgatactctccagcaggacgcgttcacgcgcaacgccatcctgtgtctcctcttcaggaagcacctccacgagccggtcacagagcccaatgaagtaagcctcaggtccggtcacccggcggccggtgatgatcaagtcccgggcgcggttcacaccaatgatcggaggcagtcggtatgtaccgccggcgccggggataatagcgagacgtgtttcgggaagaccaacgacgctagaggacgagaaaacgcgcaggtgcgtgcacagcgcgagctcgaggccgccgccgagagccacggacgagacggcggagatggtggggatttcgagggaagcaaggcttttgaatgtggagcggagtttgaggaggaagtcttcggtactgaatcgtcgcgttggatagttagctgcatatgttcgcgtaaattgaaggcttcaagcccgggtacaccgggcaccgggcaccagggcaccggggaaaccgggtatagggttgtttctcactcggccatgctcatgttggcgcgttccttcaggtctgcacccgcacagaatgctgcgtctacgttactcgctataaccaacgcccgggttggcccgttgcctttttcggcggcgatggcttccacatgcttcgcgagcgtgtcgagtaactcggtcgagatcgcgttgcgagcttggggcctgttcagctgcagcacgcgcacatgccctgagcctggggccgggatctggtgggtcttgataatgtctccttctgtgcttgtgctgtaacgagagacgaagacccgggcaggcaccgcggtcgcccggaggtgggcgagaggtgcggagaggcggacgaggcgcgatgacatgatgcttgtcattgtgcaattggcaattcaaaagatcgagggggtttacaccgcgatattaaaatgatgacagaagattactgcgctaaaaggttctcgggtggaagatgttctcggagctcgggtgtggggaaagctttgaatccgacgattaccgaaagcaacatgaacagaataatatgggggggtatcatgtacattgacaaaagtcctataaaactacaatattatatacacatagtcactggcagtattctgtaacctccgcatcactcggccagtcccagcctgtccggctgataaggtcgcatgcctccatgatcaggtccgatggtatccgcgtgtcgattcgttgctgtcgtctttccaaaaacaccctgatcgccacaagggttcgacgcatcattttgtgtccatttgcatgttcatctgcagcttctttcagtagatcagctgactgactcatccagtgcagcagatgcaacaacccttcgtcatctcctacggaccccaaagcccgaacaaaagcatgtagcgtggcaggtgatggtatttgcagcatcgagggaactttgagctgtgtttcggaaacgatatctgctgcaaagatgcttcgctccgcatgctccgaggttttggaggctgggagaacgagatgatcaaactgatgcttcaaaacctgcagcgcatgttgcatcaaagcgtcaatttcgtcatcaccctcgtttttagccttgagacgacggatacgagcattatggatcagcataaagctttgttcggcagtgccagggtgtctgagggcagcgtcaatggctttcgtaaatgccacacataaaatgcggaatccttcctcgccaagttcgacatcgcgctgtcgcatccagctcaatgctctgagagcctggtgccatcccagtatgcgctgaagacttcggcttcttgggccataatacccagtgaggcgctcgcgggtcagagcagataaaatgtgagtccaggcaggggtgtaaggagcacgtcgcaatttagtcaattggatcgcgtgccataaagcccttggatgatgccggtttcctggatgttccttggagtatgcgataaggtctattttcgcaccagtcgaagagtcggccgctatcaatgccgggaaacggtcggttgtgagaatatttcgattaccgctatccagactggatatatctgaatgtgtgcataggaacttgatgaacgatgcaaacaccaagtccggcaattcatgaaaagcttcaaggtccaaactgtggtatttgcggggcttggcccgcacgatggagagcacctctatatgagcatctgtcaggccactgcattggagataatacaatccagaccgcagagaagtagccgactgaagtagtaggctgaggaatctcccagagggccgaagcccttgtgcacgcatctggtcaagtaactcatccatggtaggcggttctgtgggcacatagataatgtcacgagcggaagccggttcggcgtgaacttcacggccatcccctggaagagcatgactcatttggtcaaaatcgcgttccatggcgtgtcgtcgatatattaacttttcagccatggcagcgtagatagcaccctttgggggtagcccatgatcctgataggagagaaaacacgcccaggcctcacggacagtcctcgtagaccgaatgcgagcaacccacatttcgtgatgattggacttagatccatgtctgtccggtaaagcttgcgggcgacgcatcatagctctcgtctgcactgtcgggctgtgatcggtatcccaaccggccaaaatcgaggatatgtcctcccacagacgatgggaatagccagcatctttcatttgtgaaagtacctgcatcgcacggctgaacatcccctcattcccgcgctgagaatcaattcctagtttctcttccttccaaggaggccatgacggagctttaagttcagcagactggcgctcttcggatgttttcttatgggccagttggactgcaacaactgctcgatatccctgtcttgtgacgggaaggacgggcttatgggttgccatagctcgaagaagctcaaattgcgcttgctgttgaatagatgtagatcggtaaggggcaatgttagccggtatagaaagtaaccagagacattcattaaatttgacggttttgacgcgatcatcatttcgcgtcaccaaagctgacctctcggcgttatcagcccttggggctgagaggaagcgagcgaatgcacgtgaaatagtgagaagtgattgtggccacactcgccgagcatgacggattaaacgaacgaccaaaatcatacaggtgccagaatcgatttgagggcggaagacctcagggggtagctcaagatcatgttcggcaaccccagaaggagcttcggcaatggggaaggtatgtccgctcatcagatgtaaagagtggattaaaagcaaacggaacgtgtgagcatcgagattttgctgtctcaaaagatggaggggaatgaaaggtggaatgtttgggctagcagcgccagatttggctctgtccgtttcgaacaaaaacagccgtaccattgcctcgtgggcattctggctcttcatgatccaggcccaagcagtcacatcggcggcatcgtagccacgcgatgataaataatcatggcttgtgcttctgaataccttctgcagagcgatattcaaatctttctccgtacttttatccgacacagacgaaagcaacgggtccacctctcgtatatactccccaagaataaccggcagtgacggcttttttggtcgaccaactgtcctcaactcgttctgtgtttggagagaatatttggaaagagcccgatcaagcccagctgactggccgtcatatccaagggggtggccagtgtttcgcaaagctttcgagaggtattcggcgggcttcggtttcactctgatgctggcggtcttctcaagccttttctctctgagcgagctattcaccgattcttggagcaatgctgcgcattgttcgtcaagtgatgaatctgatcgctctttattgaagagattatccaaatgtgagtgttgagtgtcgattgcaagtgactcgggcacattgaggaacgccgtggactgaaacgaacggaaactgcctgggcttaggccagccaggaaattgcgcgaataatgtacggaaaacttggcgtcatgataaaatattgcctaggacatatcaagttctttagcactatgttcgatgacggggagtataagaagtcaccttgtataaacgactattgagcaggtctgctcttagccgtgatactcccgaaaggcttcgggcatgcttgagaactgatgacatccatgaacgtagtcatgggtgaaagtgcctggacgccacagacccattcaataggctcaaagaggtaatttgtctccgaagatgagaaaaagtcaagacattagaaaaatacaacaatcgcgcggcagaaaattgaatcacgtgatggatcgtcagaaagcgcgccattccgaaaagcgcaacgcagcgaacgttctctccagcaaaacagaaaaaagagaacagttgacctatttgttcgagggttttctattgtattgatcattgtcctaatactttggtctctattgacaattattcctgctccacattcacatcttttattgtggtgacgtgaggatttgatcttccctcccctcgctcttcgcgatccccatcttctctaagaattcgctttcacgccctacccatcgaggctacttggattccggttgctatccgaaccaaatattcacctcaacactaaatcgccagcaaatattaatttacacgatcgcatcctcccaatctttccttcaatcgtctgatttgtggaccccatcgatttgcattggaggggatcgcgtcaaagcaagtatcgtcaaccttgacctcggcgcgacttcacaaccatgagcgccgacgaagctggagacacaacccccatgtctaccacaaatagcgaacctcatcccgaccctgctactaatgcaacctctgggaaacggaagcgctccactcaggacgacaaaccgagcactgagtcaagtgctccagcctcgcgcgatcgaacaaatctccatgaaactcttcgcagcctgattgagcttcttctgaagtaagctttgatgaaagtatgctctagtattgtgctgacaggccgcagacatgacactgaactccaactcctctcttgccccttcccaaactcaactgctaagcctcgaacgaagcgcgcaaaggtttccggcgattcagaaacctccaacatccaaacacgcgtcaattcgggcaaatacaacacgttgcaagagtttctttccgacatcgaaagagcatcggctgctgtaattgaacgcaatcaaacacaggccaatggcgcgaaagaagatggggcacctttgaatgaggtggtgaaccggatcgcagcattcaagaagcatatgaacagcttgattggtcaatccttcgtcaatcaacccgaggtcaaaacagagacgatggaagacgataccgacgaatcatcagagcttcacgcgatcaacgtctgtcagcgcgaggataagcctgccctaacactcttcgggaacccatcgaatcccaggcagctattctcgagtcttcaaaaatcggtgaaggtgccgttgtccgaatcaggacctgagaagtttgttgaagtgcaagaggagctgcgcgaggtcgccctgcctaatggcatcgcagctaccaaagtaatccctttcaaccttgatgctgctcaagcatcgaagcgaacatttggggaagtgtttgcgccacgcgaaacattaccaaagctagaacctccgcgcaaacgatctcaccgggctaattcggccacatggacggatcgcttcgacgccactttcgatgtcaggacatttttgggagagcgtagcaactattgcctggcacccctcccttcaacccagtggcttcaatacggtggagtcacttcatcacctgcctactgggaccgtgtagaaaagcatgcagattcggagaatgttcatcgccatggagatcctgctctttggactggccctgattcatctgctttccagggtgtcttctcgtcatttgctccctcttacgacagctctggcgcgattgtacagctcgcttcgaaggacatggtctggtggggacaacggggtgcggcccgcatgaacaccctgctatcggtggaagcagacagcaaacaaaatgacactcagaccgcccagcctggcaatattggcgaacttgatgagagcattctggatgaaatggttgagtcattcaacgcccaagactttgctggagacatcacagaaaccgatccgattagtgaagtcgaaccagaatcaaaagagatcaagcaaatgcttcaggatgtttccgacttgctcgacactcttagttcctaccagcgactccgaagtctcaaactttcctctgatctccagctgcctggtcaacaattgcctgagtcgaatgaaacccctagccttgatctgggcgatgtgaacacgccctctgaagcagagacccttgtttatgataccctcaagtcaagccttgctgcagtcatcagcaacctgccaccttatgctgtcgctaaactggacggtgatcagctcgcggagttgaacatcagccaaaaggttttggttgacattcctgactacagtggtaccatggaaaaggatgacttcactttgtcacaagaaagagccgccgcattgctcgcagcagccagcgcagcaaatcgaacctcaaccccctccgcctcacgacccagtaattaccaaggctctcacagtgcctacaaccaacgtgcttttgcttccaatgctcgggctccgcctcagcccgggttccaggtcacaccgcagcacgcacggcaaccctcagttccaaatacatacacgcatgcttatggcgcggggcgtccaccgagcacacccagtcaacgtccagtcaacacccctcaatacgcgcaaatgaacccacagtacagccagggcagccaagctccccaataccagcgccctacctccaatggatatgcccaagtgtctccccaaccttatacgccacagcccaggcaaccaggcacattcaacgccacgccacaggggcgtacgccatacgcgactgccaccgcgaaccagcgagttcagtacccaggccagactccttcacaagctggctactcaaactcggccgctagtgccacatactctcgtagtgcggccgaacaagctgcgctgatggacaggaacaaggcgcaactagctgctcgacagtcaggccacagcccttcaacgcctcaacctcaagggtcggatgcccgtgcttcccaagaaggcagcatgacaccagggagcaaagcaaatggtacacccctatccacgtagggcagatatttgcactaatccaagcatgtggcattgtgttcccattcaaaaatgcgatttgtttctaaagatggaaactccaacattacatttctctacagtcggctttctgcttttgactttttgcattgttcttctctctctttcgtttccaattatgagctctgaatgtgatccgcgtccccaatttcttttctcccaactgtgtttttaattaacctcttgatcctcggttttgtatgactttactttttggtgttgtattatggactaagcgattggcgtggatggttttttttcaagactggtcggccggggtgtataggctgcctctgcgatacagctaagtcttgcttagagagttacttgtttctcgcttccgatgcaattcaatcaatatgctgcatatcagcacacctcgtgctttccatggagattcgactgtaaagggggatattgagaaaacgagctttcgaagcgttcctaaaatcatatctcatacagtacactgctatccccgatataaaaaaatacccatcctgctatagtatctcccagtccgctgtatcttctgcccaatgctcatagtccattacatgccaaacccgagatactcatctatctgccctatccaattattgaagtaatcaccggaaaatgaacgccatccctttcttccgtgcccagtagtgtgtacccatccaaccttcccttcacaaaaagacaaaaccaaaaccaagaaagctcatcgccaaggaaacacacaaaaaaagaaaaaagaagattcgtaaatcataagagttgatagcaggcagaaacccaactcacgggagtagaacatcgaagctagggaatgaacatagcagcaatagccatgaaaccgaagtatctagaagcaaaaggtcagtctcaaacgcagccagaacagagtcgaagcaatcatacatcgtagcacagcgccaaccatccctcgagtcgaccagtgtatcaataccagccgagtaattcgccgcaatagccgcggcggcaccaccaaccaccgtcacaacgaccagacgaccagagaactccgcaataagactgaacgctagcagtggcaacaggagcgcacccgatgcgatgattattgcgacgtagacgggtgctgcagcggccgatgcagccagtcgcggagtgagtgagaccagatccgcgtcgtggattaggaaccgcgtctcgacaccagcgatgggcttgtgctctctcatccagccgcgatagcctgcgatatcctgttccgaggcccgcgggagcgtctgtaggactttgctgtacgcgcagagggcgttgtctgcgtgctggtcagagggctactttgtgggatagcaatatgggaagtggaaggagcttactgtattgttcggtcttttggatcaaagcgctcatgagatccatgcggcggtaatgcagcgacgagtaagcctgggcctgggcgtcccgtctgcgggaggccgggaagggctttgcgccttcctgctcggctgtgctgactcgatgtatttcttcgtactcatctagcgtgtggagatcttcttccatttgggaaatctcgtcttggaggtggaggaggacgcggtggttgacggtctcgaagcgtcggtagagcggagggaagcttccgctctcttctgaagcggatttggttaggtgcgaggctagaagcccgtatcccgatggctcttgcgatacgttggagtctcgtctctttgtcggcgtggtgcggtgaagactatcttccgggcttcttgggggtgatggtgggagcggtggtctatggatcgcaccgttgtctcttggcgatccatggtaggtctgtggtcgggacagttctagttcgcctattcctggagaggtttgcgcagtcgagattgggctcggctttctagtgggttgtctcttccgggtgactaactgattgcctgtagaaggcgcgggttttcgtggctcttttggacttttcgatgctactgggggtgactgggtgactttcttcggggaaatgttgcctcctgagaccaacactccatgtggcacagtgtttgtccgcggcttaggagcctggatctgggtggtggattgtatagggcgtggaggctccggctcctcgtctgattcagactccgaggatgacgataacgaggatgagtctgaagatgattcatcgttctcttctaggaactcaaagacattaggcatcttcttcgactctggcttctttgggttcgctggagcgacaggcgcatttagggcttgtcttgacccatttggccgttgtgaaggtgaactgttctcgacagttttagggcttgcgacaggaccagcctgtgggtttgtagtattggacaccaacgagtatgtcctctttcttccatccttttttgactttctagtttggagcatgattatcggataagttcggaatcaagacccgattcatacaaatcagggcataccagggaaagaggagaaaaagagaaaggaacatgaaatgaatcgtagtagggaattcgcgatggaatcaggagaatagggactcgaggcatagcctaggggtggaattcaaggtctcagatcgagtgtcaaaaggtgcggaatcctaggaatctagggggggttgatggaaaatagtatatctccaatttccccgcgaattccatcagacattctctataataaaggaaattggtattagtattatcgaaacacgaaacgtcaggccaacttccaatgggaataggtttgtgtcagctgaaaagcccgaatggttatgaagacttgtaattcgtcacacgagtcagtccgggaacaatctgaagcaacttagaagcgccgggctttatttagatcgaccaatgataatcgtatcgcaaggagcttccttgtatccctgttgatcgcgattcaaagaaaccaagagatagggaaatggtgacgaattgccgagttgaacattctgaacaattcagtgtgggccaagttgtgacagcaaatcaggcctgcagagtctgaaatgcaaatgcatgtgtgtctgaacgaagcaaaggaacatgtatgcgctggtcgatcttccttgcatctggcggtctagcgaagtgggggaatgtgctgcagctatgtgagcagtgtacgatgcagtcggtacaacgccacctatctgctatattacgtgcatgaagcatgaagtgttaagaatgtattgacatggagttgagtagttatagagtgtagtgggtactaagtcagagggtaaatggagatcaagtacggagtacagagtatgttgtatagggaaggtatatatgcagtttcatatttttatagttttaaataccattattgagtttataatggcgatttcctctgtgtcacaacatacaatataggtacaacatcgtatatcaagtgatggcatctccgttatctgggctgcttctagactcacctgacgctttaagtatatgtcagcacggactctggaagtcacgtggcgcataattgatgaccaatcagttgtgacaacaatagtgatgcagtacgacaacactcttattatccaactctcaaagctctcaccttgacttaattcgccagattcctataaatttcatgcacattagcacaaaccctatagttgttaacatcagattttactttcgatccctgttgggctgttgggatcacactgtttctaccaagatacaagttcgtcgaattataaacgcaagattcacacccacgcacaagtcatcctcagtgaaacctacacgagtggcgctctagtagctatttacttctcagattcagataatcaaggaccgtggtttaggcggggctaaagaccaaccggagacagtttatgcgtcagccgctgaggtttcggcggactgtgaagcctttctgaggaaaggtagaactctaagtattatagacgaacctctgattgaactgctgcaaagatgaacaaatagaatgacagtcgctatttgttccagaacatgcagcttaccgatattctgagtaaccgcggggtaaagcatttacaaagacgtctataaagacacacatcctcctgaacacagcacttcccctgatataataccaggaataccaaaatgctaccactcatgaaaggcaaactaatgctctttgacgaagtagcttgggacaaaagcgacgagcaactagcaacatgggaagcaattcttctcaaccaagaaaccatgcagaagataaccacattaatcaaaatccaccgtcaaggcataacagatcaactcttcccgccacaaaaaggctccttcaacatggtgatccgcctacgattcctcgacggcgcctcggccataatccgcttcccaatcccaggctactcagtcttcccagacgagaaactccaccgagaagtaagagtgatgcgctttctcgagcgacacacagacatccgtatcccgcacatcctacaccacggcaccagcgacgaaagcccacacggcctaggcccgttcattatcatggagtatatcgaccataacgcggatctcgtggatgcgctgaacacacccgggatactggatgaagaacgacccgttctcgatcccaatatcggcgataacaggctgcgctcggtatataatcagatggcgggcttgttgctgcaggttgcgaagtactcgttcccgcgtattggatgtatatctaatgctgcggaagacgagttcgaggatgagtgggtggttgcgcaccggccgttgagtatcaatatgaatgagctggtgcaggttggtggtgtgcgagctggggatctgccggggatgaccgagacgtttgcgactgcggcggagtatttacttgcccttgcggagctgcatatgacgcatctttcgtcgcaacggaatgacgctattgacgatgcggaggactgcaggacgaagtatattgcgcggtgtttattccggaagcttgcgagagagggccgactatcttgggctggggaggaagggatgtttaaattattctgtgatgatctacgaccggcgaatgtgcttgctaactcggactttgggtataagatatccggggctattgattgggaatttgcttatgctgcgccgttggagtttgtgtatagcccgccgtgctggctactgcttgagcggccggagtactgggataatgggcttgatgactgggagtgggtgtatgagagccggttggagattttcttgcaggagctacatatgcgagaggatgttgacattcggcgtggggttatgagtgaggaaaatcggctttctagacatatgcgtgagagctggaataatggggggttctgggttagttatgcggcgagaaggagttgggcttttgatgttatctactgggcgaggattgaccgtaggttctttggagaaggaactttggaggatcggatcggattgttgactgttgaagagaggaattcgatggaggattttgtacagaggaagttggctgagaaggaggagggaggtttgatatgaagtttatatagggcataagttgtagttatagggctcatacaccctatggtcacgtacttccttggaggtattccattaatacatagctatgaattaaatttgtgtatattcacaatatcctaaagatcttcttgcacctttaggacttctagatctgttgatttcgtcatttggaatatcttcaattcaatttgaccacccgagctcgtcatcgcacgccccgagaaccggcgccattgcggggaaaccagccaccatcgaaattctttgcaactactttgtatatctagtatgatttgccttgctttatcatggaggtaatttgggtatttccttattcctcactcaactaatgtgaattcttctcaggtgccaaaagcccggggagctggcaggtcaggcccgcgtcgacgaacagggtgcctaacatgcaggtcccgtaaggtccgatgcgatgaagcgaaaccaagctgctccaattgcgatcgactatgtctactatgtctgtataaaccacgcaccgcacccggcgtgaggttgggttcatcgccaactcgtgcaaacaagactactgcatcgaataacacagcacactcggggagttcaggctcctctgctgcagccacgactgcatcccgctctcccgacataaacttctttaataccgtgctccgcgcagacggccacacaatacccgcgccaacaaccacacttcgacagctccctacagaccagggctcccacccttcggagtttgacatgctcgtattcatgggcgggattacttctgagctggaacagaagcacctggacctggctgccggacccgcgatgactttgaccgctagtccagcgtcgcagtcgctacgcgggacactcacaccagaccgtcgcattcttactccaaatacctcatcttcgggcagcgcttcagacatgccaactagccggggcagcttatccgatgcaggcggtatctcgtatgaggaccaactgctacagcactttctgaccattggcccgccggctgctctttttgcgccggtcaacatcgagtggaagtatatgcgcccagcgctgctggttcatgcacgagattccagtccgcttttgaatgctttatactgctacgcggatgttcataaagcgatgatggaagggaaaaaatggcacttcgcgcctaccttctatagagtggctagttcggagatccaagcttgtattcatggcgaggtgacggagtccacactcatcaaagtttttggggctgtttttctcttaatgatatccgaggtatgttctgcttagtcccgagatcgagcgaacgctcatattatttcagcttctctcaccctacggaatatgtaccgggacatcttatattcactccgggtaccttattctacaacgattccatgatcgtactcgacattggaccggtctcggtcatcttttggtgtcatggatcttactgctagatgtcaagtccctgattgcaggccgagatggcgatcctctccctgaactcggcaatatcccagaacatagcataacacaaccaccggatacacaaacttcccaaacatctcacataaccgcaccaacagccaactttaaacaggaggacatcatcgaagacccattcctcagccccaactacctcgtctacgaagcaatcgtaggcccggcattccgattcttcgtacaagcccaacaagtcgtacgacgcatagtctgcatcgacctccaccaccgcagccgcggaactctcaccgacgagttcgaagtactccaactcgcccacaaaatcggcgccgatctcgaaacactctggcacagacgcccctcagtaatagacgtctacggacggcccgaagctctaactgacatcctttgtgcgcctgtggcatcggaaatctgccgcacattccgacaatacgtggccaacttcttagcgaattttatctacttgcaccgcgttgcatttgcaatctaccctcgcacagaacgcgtcaacggcgccgtcgatcaaatcattcaactggccaccgttgactctgccgggccagaccatctgcccgtcagcttcttatggccgctgttcattgcggggctggaggctacggaggaccagcgcaagtggattggccacgagattcagcgtatggctgcggcccacgaagctgacgcggcaccttcggccactcgtcacccgaccgctgatagggtcctagtgctcgtggaggagatgacccggcggcaagatgtgtcacgcacatgggcagactcgaaatgcgtgaggcgggaaatgttttcggactttttcgttgtgatttgaacttcatgttcggcatgagaggtgtagagattttctcataaaatataatacgaagaacctacaaccatttcaaatattctaaaccgacccagatccaatcgctcgatatgacactttatctccgcccatacagcgtgatcgatgcagtaggtgtccccgttccttgcgcacatacgtcgcaaaacagatcgcagcgaccgccacagccccagaactgatcatcacgggatacctgaactgggccggcagcgggaaagcaatagtcgaggcaaaagaaagcatctcgaacacattctgcagcgccatttcagtagcagagaagcgggcacgggcatgttcctggatattctacatcacccaacaagtttagcacatgcacaagtcaagaatacggaaaagccacttacctcctgcacgagaaactggaccgacaaatcgaatccccaaagcccaatccgactcaaagcaacgcccgtaatcagcgcacccgctacgaactgcgagctagggtcccagaaaacgaaagccacggtggcagcagcgatgcagataaactgccaattcagaaaccacagcccggagcgaatcggaccaatccggttcatgaccataggcgctgtccatgtcccagatagctcggcgaccacggagccgatgcgcatatagctgacctccaacggggtgaagcccgtgtgcaacaggtatgttaccattgttgcgccaaaggataggactgttaggtagagcaggctcagggcaaaggatgctaggaagacgggacttgctatgtactctttccagggcgctagtgagcttgacaagcagcgggtatcgctcttgccatttgtatcatctgcttgtgttgtaggagcttgtgtcttggtcaaggccgggactgattggtagacctgagcaatggccaaatactcgaccagcacagatgcggtattcatggtaaacactgtccaaattgcatatggggttgatatgctgtcgatcaaggagatgaatactggtgctaggagcttgcagaagagatcaattcgtctcatagaggcgttcaagtctgtggttcgaagttagatattgcggagcttcagctagcttcagggttctcaccttgtcgagggacattgatactttccgagatcacgattgcctagtgtcaaattatcagcgacatctcttcctaaaataagattgtatatcggatgcatggaaaccagacaacccaaatacgattcctcgtacatacccagtcccgttccacagccaccgtattagccgtagcggccaatttctccatacaagccagtaagccctgcacggtgaacaaggcaattgtaagcgaccaagagtctgtagacagagtggccacaaagcataagcatgagatcgcgacagggactctttgccacactactcctttaattagccattggccttgatactcggtacatattgaagtatccgaaacgattccaacctaccaatggaatgcctcacagcaacgagccggtctgagcgatcaacttgcgcacccagccacgacgacagcgcgacggctgaaaacgcccgcactagagcgtatatcgaagcatacagtagtgtccccgggaagatcgaagctaggaagagtacggcgccgaattcaaacatgcgggagttccatgttgagagtgtgtgagatatgtataggcgtgttagtactgagtgggcttctggtgctgggctatcattttggggtgggccatcatccgccaaggtcggcaacagagggttggaggaattgctgatgtcttctgatggttgccggctaggctctgggaactcgctcccaagaaccatcttgaagcgctgctggcaatttacagcatgtatgcaagtgtcgggtcgaatgcttatgtggatttgacagcaaattgggcggatcagcaatgccgtgggtgggctgaggaccctcgtggaaacttttatatcgtattgtctatggtgttctatttgtacctttaaatctcattaggtttgagtccatccattgagtactacagttattttctatttgaaaatgatcgttaattgcagattcaggatttgcaataatagtatggtatatgggccaattcccaataaattctaatacacccgaacagcaaaaattacaagctataaacggtatcccactgtttaatccaaccacttaagtccttcgggagatgatgtcgttgtccgtcgggcaatcacctcgaccacctttcggcgcacaccttcgcggtgggcgtatttctggaggaagtagtcgatcacgggtctccgcgatgaatgtccctcacacacaacctttttaatctcatcttcggagggaagggcgaagtgggcataagggtatttagtgtaatctccctggctcagaagcggtaggcgggactcgttgtcggggatctcgaagaagtcgtccacaattttatccgagacatcttggagagtagcgggctgccactgggcctggcggggaggcttggacatcagacgggccttgacaccctcgacgaaatcagggtggcgcatgaatttggcggcgatctcgtgctcgcgctggaaggtctccgtgatggtccacttcttgccaagacgcatctggcgcagagtcaccttcagagaggtcggggagcggcctgacagagtctccaatgtcttttgtgcccactccttgtgctcagtttccttctccaaggcctggataatctcttccatggtgttgaatccgaagcagcggtcaatggcagtacgcagggtaccagccatgagcatcggctcctcctcaagcggggggaggccaagggagaactcagccatggtcttgttcacaatttccaaacgctcgcgaagctcgacgtggtcggggaaagtcagctcggaaagacgctgagtcacactgctcagaacactggagtgcaagtagtgtgtggcgatgcctgcgtacagagcctgaacacccttcaagcgctccgaggtcaaagccaggtatgtaccggtctcaccatccagacgcgggaggaagaaggaaccgccaacgtcggggaagaagccaattgtggtctcaggcatagcaaaaagggtacgctcggtcgcaattcggaagggagcgtgcatgctgaggcctacgccaccgcccatggtgattccatccataaatgagatgacaggcttcgagtatgtagcgagcaggtggtcaaggcggtattctagtgcgaagaagtccgctgatgctttttgtccctccactccactctcattctgcagggccagagcagcaacgtcacctcctgcgcagagagccttggtgccggctccggagatgaggatcatgtttgcaagatgagatttctcccactcctattcatccaacgcttagtattgtatgtgtctgaagttccgggtgtccattctaaccttcaatcgagggacaatcttgcgagccatcgagccgttgagggagttgagcttcttgggtcggttgagttcaacgctgcggaggccgtagatcgagttgaacaggacatcatcgcgctcatcgccggggagctctttggggatatcagatgaagtcgacatctaacaaatgtgagcactggatatcgggcttctctccgaatagggtacataccatagctgttgcccgaaaggcagggttggtcaccttggcgcgtagaggcattgctgaaggaacgcgcgagatccagctcggcgaggagacgcgattgaattgtcgaagtaacattagaactggaatacgacgataaccaaggaagggcgttatgtgatgacaatcaggtatttctccgctttccttgacctcgggagtttttcgctggattttctttccgctccgactctccgcccataaccgaccagctcccaggtacattcggcgacatcaccgcaattgatgtcaatttctaagtggtgtaaatgaaaatgggttcaaatattctaaaagtgctatgatacaaaaagtcagctaagtactgaatatgttgtagctccaaaaccgactctgagaagtgataacgttcgaagtatagatgatctatttgtacacagctagataatgccagaaaaacaagaaacagagaatgatacaattaaacgttgctccatgtggccttcatccggctaaagtccagcggatacaccttctctccgtttgctgaaggcgaaaagagagtgtccaccttcgccaagtcggtcgaatgcgaaagcaggatcttgtgcagtgcattcttctcaataatcaatcttgctgtctccaagacattcttcacatccaaatcctcgacgctgatagttcgtgcgtggttgccgaacttttcgaccgcatcagagaacatctcattcggcttcagtgtaacgaatgtagaccggcccttctgataccagccatgagctttgatgaggtttatgatgaagaacgggctcgcattctcattgatatcgatactgttgtcaacaacaatcaattcgccgcgtgaaagccggtggctgagggcaatacgccaggcttggtcgtagatctttcgtggcaaatcggtcgagaaatcacgaggatgaggtccgaaagcgacaccaccacctcgtcgaactggcgacatcttgtcacccgcacgcgcacgaccggagcccttctgcgcgtacagcttcctgtgactaccgtgcacatcgtccctccacttggtgctggcggaaccttgtcgggtgctgtcgccctcgtagacgactgcgcggtggaggatatcgtgacgagtgggcatctgaagtagccgccgggagtaatggactaaacgctggggttccaagttaggccaccggtaggtcatgacttgaacaggggttgggccccctggtcgttgcgcctgttggacctggacagcatccttggtcgccactgggggctgtgtagtggcttcggttgccattgagcgtgtaaggcatcgttgctgtatgattcgatacgctgtcagtaaatgcgtccgagaaccggatcgagaagaattcatggagtgcactaaccgtcacttgcttcgggcctgacatgagtccgcccgagctgcgggacagcagcctcagtgaccgaataacatcgttccctggcattttgagagtcactgggtgatcggcgtataacttgatgatgtccggagtctcgaatggagcaaaagttgatcccgggcggtaggtgctagcagaaccttggtactatagtacccaagtatcttttgtatgattttcccttacaaaagatacttagccgcataatacacaatatgaattctcttgtccggttgcattgaatcaagtgtgtatgtcaagtataatttaattgtagacaggactttttaatttattcgatgtcttgatgtattcccgggcctggataccacttggaggtcacgtgataggttaagtgaccgaacagaaaaagttccccgggaagacaacaacatcggatcctcaaggccaagcccaccataacctccaattcctcgaatcatggcccactgcgagcgggcttcgaagcctctgctccaatgccttcgcaatacctactctagaggcgtggctggagtccagctccaaacgcgagccttccagtcgaccgcgagtgttcgagatgccgaagttgaaactccggcccaacctttccacaaggcacccgatccctctcttgtgacgagtccccgtctcgaaagacgtttgctccgacagggaaccgcccccattggatcacgtcgtcgccgtgctgcactccaagattcagagaaccttcccttcgaacaattgccctaccaatgtttccaagaagcccggaagattttgcttgcggaccgcgaagagaaattgaaggagattgaaatgatgaggcaacgccttgccagacaggaggctttgtccgtcgaagaggctggaggagcaaaggcgaagaaatcccgtgttactgccatgcaattacacctggagcgcctcaaggttctggccgatattaacgatcccttggtcaagcgaaagttcgaggataatgaaggtaatcatctcttgatcaagtgatcaacctgggctgagactaatcgttcgatttctaccaatccaggtgacatgtccaagcccatctatcgctttttggccgaccgcaaatggcgcgaataccgccgcaagatcctggtccagcgtatcacccagatgaacgtcattcccgatgtcctccctcactgcgaccccgtcgtcgagacaaagctgtacttcggcaagcgccaaatccaagccggtgaattcgtcgaagcgagactcagcacgagcgcgcctaaactcgacgtgcaaatctttgaggctggtgaaaagctagtcactattgcagttgtcgaccctgatgtcccgaacgttgagaacgacaacttcgattataagacacacttcttggccgtcaacgtccccatctcggccacctccaccaagatcgatctcgcacagcttttggaagattcgcaggtggttctcccctggctaccacctgttgcccagatgggaagtccctaccaccgcctctccctcttcattatggagcagaaggagtcccagcctctcgactttgccgccgtcaaggccaaggagtctaaccgcgacaccaccctccttcgcagtctccagtcccgttaccatctcaaggccatcggtgctcacctgttccgtacccaatgggacgccacgaccctggaggtcatgaaggagattggattcgacggtgctaatgtggagctgcgccgcaagagagttgagcctctgccatataagagacgtaacccctcttcgttccgctgatcttgtttgtcttcaagccattgtattgtacaatttgatatatgtatgaatatgcacactgatttaatccctttcaaccaaactccatgcgtatgcttaaacaaaatggaccagagtgccacgcatcggtattgtaatccaccggtctaatataatgtacaatgtataacccttagatgttctgggaatccagttgcgccggttgcaacggattggtcacccatcccatcttcgacggaggccataccctggcaattatcttcccattaatgagacccatgggcactgggccgtagttcctcgaatccctagaccagggaagattatcgccggccaaaaagacatgaccttcggggacctgcacaaagtcaagtcagcaattgaatccaaccagaacgaagaacctataacccacctgaatcatatttccatccttgccaatactcgtgctaagcggcttgtcttgacagacaaaatccccaggcatgcccactacccgcttggccacatgcacgccttgaaagttcgggtgaccatatcgcacgacatctccgacctcgattcctttgccattgcggtggaggcgcgatatcatgagccaatcgcctcgcacgtcgaaggtagggtacatagacgggccctcgctgagctggacagttatcaggtgctcccagatcagcgcgcaggcgcagaaagtgctggtgccattgagcgcaagccttccaatggtgcgcagattggcagcctttattacagaccggactaactgctccatgtgtggtgaattggaagcataggattgctcagatcgagctgcatcaactattccgcggtcgggagctggtcatgtgactatttggtgtctttaaattcgatttttttgctccacatcctccccttctgccatcatcagtcaatatgtcctgtgtcttgaaccagcgattgataggatattgccgtcgcattggattttaatatccaggacccttccagccgtatcagctgctcattaatgtttcgtgggcgctgggctgagagggatctggaatttcattcatgtctcgattattcgaacatctctacaatatggagatgttcaaacagtcaatatcctttacatatactccccataccccttacccctacccaatcccttccgggatgtccgcttctccaaatgctagagcttgccgtcgccgaaatacataaccaggacgagcacgtgtggaatatgaagcaagatgaacacaaccagcctatcttctaataggttgtcccccagtgtgcctcactttgaccccatttcattatgggactgggtttttgaggcatacatagtggggagacatctcaattagacaatttattctcattttcggtttctcatgctccctatctctcgtaaccttcttaaacaatatggatgagattatccatgcgtcaatcaatgtgactttttgtaccacgaatcagcatctaacaaacatgtaagtaaactcgaatcaaagccaattaagaagcatagtacataccgggatgcttctcgaccggctcaatgccctccctcttcttcgccttctgctgatgatccacgccatacctcttgtcccggtcctccagcaacgaatccaaccctgcaggatgtgccaacttcacgctctcattcgatacaaagctgcccatcaactgcggctcgcctagaggcacaggatctccacgatcaacctgccagaaatgatacgtcttgccatagacaggcgcaacgtcttgcatctctgccgtctccgcagcttcccagatagcgtcgggcacaccagctggtgctggcatgaccagcatgccgcttttgacctcgaactcgtgcgtgtgccagagcttacgctcttcggtgggaagagtcacgaaaatccgcggcgagatcatgtattccacgccgatgaggcgggcgtttgccttggatgagtcgtagattaggcattggcggatatctggataagtattaatgcccagcacatcggtcattcagttgtgtttggctatagacatggctgttgtcacataccctctgttaagtgagtgcaatagtgatcggcttccagacatcgagttggatcgttggcgtaaaagtggaatgcattgagatgtgcgcagatttgctttacgggcgtgaagtcttggatcattgaggctccagtctcgagtactcgactcttcattgtccgcggctcgtctggaagttcagttccatcgttgcagcagctctttcccgagtttgacattttgtatatacgttgggttcagggttgtattcgtgaattgttgaattgttaggtgttcattaatagagtctcccataaactgggatttgtactgaaatgatgtaatccatgcttccattgcattgatgtcatgatgattgcggacttcctatttgggactgtttactgctacagcatatttgaaagtagctttatcattggtagaagtaagaaaacgatgatatgtagtcaaaatttatgcaggttgtctatgcggagtatattttatgttatccttaatggaatatatgcatataccagcttcctcatagagcgacatcacttgttcgagcggttgtattaattgcgcttctgatatattggacttaatctgccttgataactcaaggaacagtctccctttgctccaacaagtcataaattggagtttttctcatatcaaaaccgccccgaccatcaaaacggtgctcatatatcttccgttggcagtaagctattgctatatcgtgcactatgctccactcaagcaacctcgtgcctaaagccttattatcggcctcgagcgtctccaaagcctcctttacccacgcgacacaattccatcccggccgactctgtcggacaggcgtgttgcgcataatttcggctacatgatatccgtccaataccttgccaatcaggatacgaacaagcaacatgttgccactgtttagtgaacactcaaactcttcgaagtgccactcagagccccctcctaactttgggctctcgttcgcgtggtaacagaaacccgtgctattctcagtttcaaatttgggccctacaatcacggaccagtggtacctaatcaagacatatattagtcttgctagtgacttcaagctaaacagcgtcatgaatggttctcacgtgtcctccttgtctggcatggttactctgcctcgtcgtgcatggagcgcaacatatatccgatctttgttggcgggcattgcaagtgaagttgaccaagatggctagatatttgctaatgatcgattattgctgaaaggatggtcgtagtggggtcttctctaaatccagtctttaccgggctctatggatgtctttatatttttgtggctcaatgctaaaagctttctattttaagaggagcgtcggaagatctactgcaacccaagtcacatcacatcgtacccaacagcgcctatagcattgggtaaccaatatgggcactttactcggataggtgcatcgtacgttaaattgaaaaaaaagggggccaatggcatttgaagaaactccaaccaaacagaaaacccccgcgaataggactgggcgcatcataaaaatagaaattcgaatgcaattagcggctcagctagcgtcgaatcaattcttagtgtcgtgtcaatgctttctgggggtccctttgtcaagagcatcaagaacacgtctatccatctaagtgcctataaaactcacgagccagtctttctccatctcattgtgaggatcccaataaagggctttggccgacagaaatacatatgtggcatcaccatatttgaacgttgtggaataaggtcccgctagagaaacccgtttatttgcacaaatggttaggaccacggggtatttgctgtttgagggagatcgccatctttgttggctgcactccgccacgaaaagctgtctcgttgccctgccgtctcccggggtggatgagcgagctcgatcggcatagcccctatattgcggactatgataatggctggtgttttttctttcccatttttgtcacgtctattatcattgaaggatacaaaccagaaaaagacgatgaaaaagactataaagatcacaaaagggaccgaagacacaacacaaccggagtcattcccgttgagtcatattcatctatggccttctttccttctttcctgttccatatttcgtcacaaaacaatcaaattgcaagatgaaggaagagcttccgggcttgcaccttctagacgcagagacaatcgtacagcgcctgtgataagagtcaagaccgacaggcctgcctagtaatctagaaatccaactatcttctgttacagatgacatgtttgacgaaatagcctcttttttgtgcactatcgagggtgaatgaggatgttatccgcatagaaaaggaaaatatggaagtatctagagatatagggaataattcaggaggaacggaaaggatggagaaataatgttcctttctatatcaatcaaattcaccaacggtgaaacgaaccctcaaaccattactccctccactgtctgtctatctatatgccatcatcctcctcctcgaccgaactctctgtgacatatgcatcccacgcctcacaagtagaattcaaagtatcataatcaatcagggcccgcgcctcatcatacctctccaagaactgaatagcaaagccctccgaagtatgccatccaatatggcaatgcatcagccaagctccgggattgtcagtcttgaacgcaatggcaaggtacccagaggccgggagcatggccacatcccggcggggcgggttcgtcaagctcgtgtcatcggaggagctgtacgtgcccgttccctgcgcgatgacaaagaagtcgtggccgtgcaagtggataggatgcgggacagccagggtagtttcgatgacaacataggaccacttgtctgcggtcgggagcacaattacgccgctctcctcggtgaatgtcgtgtcgttattccagacttgcaggagtgtcgggttatcccagtatacttgcattgctgtcccgttcagctgccagcggaagtagctatcggagtttgtgcctagtgtgactggttcgctggagttgtagtatggttccgatgcgctctgggccagatacgggacgagatcagagatgtccatgtcgtcgcaactgtcggtgtacgtgtattcggtggtggtgggagtggatattgtgctgccataataaacgatgcctttgatattgtctgcgctgtcattgtcggagcaggcggcttggggaattgcgcgcatccagaaactgtcacttccggtggattggtctgcgctgaccacaatatcgtaccgctgacctagatagaataagggttagtaaggtcatatgtaggttggtagggaaatggtctcttacccatgccgatgttcaagatagttgtggtaaatggctcgataggtaccaagtccatagccatcaccgtcagagtatggttgtcaattgagaacttgaagtgggtatctaccgcagcgttcacaagacggaagcgataagaagtgcctgcagtgaatgatgtgttgaagcgatggcctgtctgggtcgttgaatcgtcatctccatacacattggtaccgttgatgagaccattgtctaatgtaggcgggccattggcctcggcagagtaccagagttgatcaacagtctggtgactccaatcattgaggaacaaaactcctttgtccacatcatagttctcagtggcaggaccgttgatcacaattccaccgaagacaccttcgtaggcttgcaacccaatgtgagaatggtaccatgatgtgccatattgtgtagctttccacttgtaggttgttgtctgtcccggagcagtagggcattgagtaatggatacaacaccgtcgttctggttggtatagttctggcggatgccgtggaaatggatgctagatccattctttgaggtcagactgttggtgacatgaacgataacatcatcgccccagtcagctatgatggtagggcctggaattgtcccgttgactgccattgctgcacgagagtagccatcgggagcaactgtgacatcttcgatgttgaagtaatactctctggtcacgccggtggtggggacgacatcgtagtagttggtgctcacgtcgtagtcgcaccaggtctgtctgtcactggcggtatttccagagcaagcatcccgctttagccttgtatgtttgtcgtgatggatcgaggttgcggaggctactccggccaggatcaaaagagtggtccaaatcttcatgattgcttgacggtcaagaatgctagcaatttgaattttggcggacagacacgaagtaaattcacaagaatgaaagtttaaaaacaaaaggaaggatatcagcgaatgtaatattgttagaaaggactgtcggactatttgtagagaaatattgatgctacgaactattcttatcaacatatatagatccccgacgctctatcattgtgacgccttacaaggcaaattggagctcatatccagtatcaagagggtcagtaagctagtgaaatcaatgacatctgattggacttgactttagcacgacacacacctgagggtgcgtaatctcaaagtccgacggagtccttgggtaacggatccacgtgccggatcgtgccgaaccatggtttgtctatctgcaagcctatttttaagctaattcgaaccgcttgaggggaagatgcacgaagattttctacaaatggactggacttgcacgattggaaactttgccctaatgcaagccaccgtcacgaattacgtggcatatagtatctaagataacaatagagagaaatgatgatttctgaaaactaccatgcctcaattgccacttacatgaagttgccatggcgagtatccgtttttgatcaatctctgtttatcgaaagatgtatatcaaccaagtaacggaacagatatggcccctctacgccctaagcagataggctcttgttctaattcggtgatagaatacaacttattttctatccacaatatagactatcgtcatagttttggagatctcaaccagattgggattaacggacgaactcagcccgacccaataatgctactgtagcctatctcctcttattccaacgagattgcgacataggctgcaaggcagtgtcggagataaagtctccgcttgtttcaagctaactgatattcttcaggtacctgacaggaaccaccacggcacgtcagtcaacgcgtgtcccggcgcgcggcccggactcatgcaccaacccaattttaacaaccccttagagactatgttttgcgatgaatgattggatactgcacgctcaccctaaatttcgactaagtggagctctccctgcgaggacgtaacatgcaaaaggaccatgtaactatatagagaacaataggatagtcagcttcctgtcaatcttatccaaggttaaacatctttctcattatctgctatccactatgttcagttcctcggtcttctgcacggcgctgtgcctgggagcgtccgtgtacgcttctgactttgcctctaggagcactcccggcgtgggtgaggagttcggactttatgcgtatggagacgcaattggtggtctctctctgttctacggaaatggtaggatcttaacattcaccactatctagaaccgtattgaccaggtgctaggcaaggctctgattggtgacccagccaattcgactgcttcgaacacttcaagtgtatactgtcagtgaatcctacaccctgcagtcatgaatttgtgttaatatgggacatactagtcgaacgttcgtccacggatagcacttggatcgccaacccgaacggaaccaccaatgcgaacgccagctggtctgaccagatgctctacattcccagttcgtcatcttcaaatgatgaaatgggcttcgcgtctacgaacgcgtcgaataggactacaacaggtttcatcttctacggacaatggatgatggtgaaatctgattctggcgaaatctcttccagcttctatattagagagaactcggagggcgaagggatttattccttgctgtggaatgcgtcggatgatgcaagtgctattccagtgtccttgcgtactgcgaagccgtctgattcttgagatattggttgcaaggaaaaacagaggttgtctgttgtgatgattagctttggttctatggaaagaggtcgcccttgtcaagtcaagtccaatcatagctatctgaaaaggaatagaaagttttatttcctatctggaaataaaataaatatggctataatctagatctaaatctagagaagaagaagaagaagaaactgtgatcaattcaaagatcatggtcatgcgatatcttcccaagaatgtctcttactctgtaactgacattttcatattaaaaacacttaactagattgcctgaaagcatgtttaggtaacgaccggcttctttgatagattggttaatggtgaattcgatgcattaccaacatgaccttattcccaaggttcacagtccgatcaaggtagtcaagatattcgagccccggttgttcttcctttgaaaggagtacatttaccaagtttgggatgctttcttcttggtaagccgaccatctggaccattaccaccattgaacgcaatgggatctgacaagctagtcgatggagattttcagcgcggccttactaccacgatatacctcttgctgttgttgccgatgcttccttgtccagacgacatcacaccgataagacctttcggagccacatgatgtgccagagtttcaacgacccgcatgaggctaagcgaattcgtgaccatcacatgtacaaaatcatcggtggatacatctccaattgtttggttgggtcacgatttgtgattccagcgttcacaaaaaggatatcgaatatattgcccggcaagcgcctatcgagcgccttgatttaatcaggttggcaaatgtccgaggtcctaatttcaacccggccgttgtgattgtctgctagctcgtggagtaatgtccgcgcccctccgccgcgcactgttccgacaacgtttcaccccttttctacgaattctgcgtagcaccgatgataaggatggtggggggtaaaatggagattgtgccgagttatgctcagacttaatataatttggtaggttaggctccttttaaacccagcaagtcggcttggcagtttctagtgttgggtttatctccgtcagattccctttgaagccggtgattctggtatctgtagcaggtcttcccatattaggaaataacccctgcttagccgtatcgcgacttataagattggattcagcgtcgagtgatggtgaaagagcgaaaatcccgttgaggggggtccatagggatctgccgttgataggcgacccaccatgtaggtcatgcagtgcagtggagcccgcgttttaaggcctccgtgtcaatcgtgtccaccctgccatcatcctactcttcatcaatgtggtcagtgtcaacatcgcaatctaattgttctccaactgcagatttcttccagcccatgagtacaggagccggagccgatatctaagatccgaaagcgccaggtaaagcaaccggagtatttcagctaggccctctctgtggacccggtctagcgctagtgataggtgctttgacccagggtctaccctcaccatatttggcggtgtgatgctggtgctgattttcctatgtttgccggacaccatggcaaagcgcgagcaaaatccgcagatcgaggagcataacaacatcagcatgattttcaaatattcatagccgtctttggcccgttcaaggcgttggccctgccccgctttcacccccgtcatcacctttactatgtgcatcatgaacgtctccatcaaaatcatttccgacaaggctccctaaatcttcaccattatcgaagtaagtcttgtatacatatcactgacaatcgtgtacgccatctctcaatatctggtggttcgctagatcgactatatcatgatccgtgaggcgacccaggcaaatcgctacgatgagagcggcaagctcaagttccactccctggaggggagcctgaaagagaagggctctttattgtcgactttttacacaacctacgagccgataaagacaagaaacccagcttgttagtctggtgtctggttatctatctttgctttgaagaattcccggagaagacttatgcctggcccgatttcgtccgtgtgactattgcgccgaagaaactactgctaaacaacaagcagtgatgtcaaaatggactctcttccaccttccccaaatcctagcggtgcaactgcgaagctgagcaccacagtcccgcctgacgttggtcgattcgcaatgttgatacccattgatataatcgcaaggttggcaatcgatgcagcagctaactcgggctctgagccccatatgaagtttataaaggaatcagtattcaacaaaacgctgataggatacttcgaaactgtccctgactacattgcctgaacaagttgattttggatggaggccaatccttacaacggcggtgtggacattcttctgtgcataaaagagggccaggaaatggactaccatagctcgggggaggatcaggatgccccagcgttggtcttcacgctcgtttcaattagctcaagggagccggcggattcctttcattgctcacaacaaaaggagagaagggggatggatggtgaatggaatggaaagatattcagggcttaccaacgtctaatgcagcccaggaataccacaatcattgaggaatgtgttttcgtttacgatatgagatcttttctgaataagatgatatcgtcgaactaaccaaacatttccgtgaacagtacgaggctcagactctgtctattccaggacgaaatgatgtgcgcttcggggatcggatagtacagcatccgattccgaaaggggattctgacgtgattttcagacaggagaatcagcagcagcaaagcagattttaattctaagtcagaagacacgcagctgctatggaacaagagttggaaataacttcgtgtatctgctctgggttcaatcgttggttgcttattcctactggccatttccatgatatggcacacgtacgtgagtctaaactacacacaacatactcgtgagaagctaaaatcaaccaggtgtaatgctgtctgatttcggatgcgcattcaatgccacatgtgaacagtgatagtgtagacactgtacgatatcccgcacccgatcaggttgacggaaccccatgatggagccgtcggttattgggagtatggtctaatcagattggggctgcttctgcagatattgattgggtctctctgggaagcagggaattaaacgggaggataaattgacatgatcgaattttgacatggtctctctggtcgttccaatatatatttccattaatgactgcaccgaagcttccatcgcacatcgatggcctgataattgcgtcaaggagaccagaatatgaggggaattcgactccatcgcacgctctcctcactgggaaaacggcctacatatactccatataaagacttggctataccaattttaagaaaacaagcctcatttacatctcacgatcgaagatcaaaaccatcgcaaagcctaaatatacgtagcacacacataagcggtaaaattatttctcgaaataaccacagcgcaacaccgcaacaccgcaagcccgcaatgaacaacaattaatgtgttattgtagaagcctcatccacaccaagactctgcactccacactccaccggcgatctacaagattgtattcgcgtaaagtgtaacagcccagtctactgcaatggtcagtgcccgaaatcaaaaaccaataatgcgctcatcactcttccaaagttggtaacacacccacctttattttgtatccaccactgtgtgtcggtgttggagcgggaaagaagcgggagagggactccgttggaccatttgtccgatatggcaatgatactcggttttagtgggggctgcgacttgggtaagctggtaaactggggctttcagggggctgtttccactgataatatagttttttttttcttctttcttttctgtgggtgatcctttttgggtgatctttagagtggcaacatggatttaactatggagtttgtatggagtaactataatatgcggaataacacataacgaatgttggtgcgctgtagctgcatatgtaggggagagttggaatggcaagataaagtactgtggactcggtgcatattgcagagtacatattgtaggcggcctgagtataaatatacatatacgctgtacgttgtacgctgaagatgtagacttgtatgtggggatacatacggaagcactgtatatcacatctgtgtcggcatgcagacccggttgtggaagataaaattgcagtgatggatggagaacgcggtgaagacagcaaagcgggtatatcacggagtcgaatcggaggtcggagtgcatgtgtgataggcaagattctgatgtctcaaaactcttgacgcgagcgcgggcaattacatttcttcattgggactagtttattaaactattatggagagggcaggagatgcttccagagcttgagcccctccaattttgtaaagcatgggaaaaggtagaattacaagtggctgtgttctaccaaggccctcaaagcgcctctaatctttaatctcatgtacaatatcgcttacggtaaattggcaatgtggtctacgacacatgataatgccgagaatcgaggctaggattataaccagtgatatgattgtgctccccgatatagccctagacatggtgtgccatctcactgcagttgcatatacccctgctatcagctgcaccgaacttcttctggcgacaggtatgtagaaggtcatgtcgactgttggacaattgtaaatagtaacacatagcatacggagtactccgtagtaaatagtcagttggagctacgtagtatacgaggggcagcccctcaggatcagcccctgcatgagtacggagtataggagaacggagtacggagtatggatccccaagtcattgattttgattttcctttgtttggaacaagatcagcgcactaaggagatcagcagctgagttatgaaaaaagggcgagtgcatagaccaagaatgtggaacctgggttctccgtactccatacccaggagaaacagaaaaagagcgttaaattggtaaatttgccggtgggatttgggaaggttttggagtaatccaggcggaggaatgcgattggcccaacctctcgacggagaaccacgttggcttgacctggccgaacctgggcttgaccgctaggcgccgttggttcctccatcaccagatgtgttcaccagtcataagttggacttcagataaggaatgtctccccctgctgcacctggaccttgcgtggcgtcagaaaccaacatatccgaggatggccgcctgcatttatggattgcgcccgatacatatcttttgactttccaatctgattgttgagtcaaagagtcgatgacgaagaataaccgtgaggctgcatcgtgcatcgtgcattagaccttacgtgtctgatagatgttgtgtcaccggaccctggtcaggtctagactggaattgaaagcactgttggaaatcgccctctgaagcaccgcacgaccagctgattccattgcagcctatcgggaaacggcagctctaagtttcaaccttgacgacatttgggtcatagtgtcggaggataatcccaacgatccgtcgagtcctagggccccgccaattagtgctgaccattggatttggggattgcgaccgaggtgaaattctttttctttgtacctccttagatccttcatatccctgtttaatccttgttaattcctgttaatccctgaatcccatcacatttcacatatcagaacaagaacaaaggagaacgcacggggaccagggtgacccggacgtttgcatccgatgctacaccgtaaggagctgatgacatggcgctaaagcaagccaaattgacctggcccgcagctcccgctgcattctttggagctaagaaggggaaccgagcaatcataacccccgagttggaacgtctggaaggatgaaggaagctgggatcggctccgccctcctgtgccccaatagtggaggggtggattcctgggcggtgaaatgggaagttcatcactctgtctagtggatatagaatacgcgccctttcggaagttactgtccttaggccccgttatggacgtattaggcctagttgcactataggaaagtcgatgatatgaggacaaaacatggtactgggccgtctcggatcttgcctggacatgcagggtttggagaatctcgtatttacgactttgtaaaggtacaggctgagtcctgatccctgatatgcctctttgtatgttcaaaggggggtgatcagaccagcattaaagaaatcccaatgtgccgctgttacggtgtgctcagtgcataccatagaggatcggcattttttctcatattgtgtcagcggttccactagaggagaactttgattaagacaaatcagacacatctgcctccaattattcctttgctttctttccttttccgttcccttttttaatgggagtgggtcgaaggtgtatgccgcgtgatgggcttgatgtgttttgcatcgagatcggctcttatttgtatattgtatattaccggatcttattgagctgatttataacatgtgtgttcctctcagaaatcgcaatttaaattgctatctccaaactatatcctgcaatatacttaaattaaagaaaaatagaaaacgccccctgaccagacacccgggcttggaccgggtattgatctgtttttggctttggcagagccctaagcacgatcagatccacctggccacgttgtgaatggctccaactactcctttttctgacacaaactggctttttaacttttctaaaatgctggcttcattcattttacttccacgttagttcacgatgccaagttctaggaattggcgcccatccgagactggacctgcaactgtctgttctacctgccatcccatcttcggaccttggaaactgcaggtgacatgaatgatatgaagactgatcacattctaagtatacatcacgtcactgttggaacacaatcccaactcaaaagtcaagctcaacggggttcaaccgcttgggatagccgagcttcccgctcagagcccaatttgttactaggccgtttttctagattgtctagcaggtacgtatgtacggaagacatatgtactttggtggcgcctgtgatagttttctgtgccacgctcccgatgaaacaggcccacaagcgttgaggaaatcgtccctacactacggatactccgtctgtattaactatattttagttgccccctcttttttttttctcaggtgatactagagagtgacctcaaaatgttgattcggtaaaaatgcaggtagcctaaacctcgcatggtccaagtttccgttttcaattcagccaagccgacctaagtgattggctgtgacctgatgaaagcgcgtcgagtagtctatttccaggctcggaacatttaaatgagaaaagtcaaaaaaagagtcagaagtatccgtaaatgattaacgaatatggtggcaatgatgcatctcctgcatcatgtactccgtagcccgggtagtaagggaagtcagcccatgcagagaaaatagcaacctcgcattcgggtatgcacggtccaaagagagaaacgacggttttgttctttaatctagactttgggaagggcgatgacgataattatctttaactccactttacacccctgtcgaaattcaaaatggcagtgcgtagatctctagcccatcacattgtaacccttgcgtaacgagcccggcaacgctatactggggagaaggagaacaagggaaggaaaggaggacaaggtgtcctgtagatgacttctcatctcgcattcttacaatcagcaagaaagagaaaccgactcagccttgggggaagtattgaccgcagatcgggccggatcgcgggtcaaccattcccagcggctaaagggtcaaggttccctgggaatttgggaatttggattttggatttctgcaatttgctttttcttacacgaaaagggaaaagaaaggaaaaacctcggaaacttaagaaaacgggagcgtctaggctgtgtgagattacttttagcataagataccgtaactatccccactatacacattatacactatattatacctgctctacctagtattcctgcctatcataccgaattataccctattcccccctcttactaggcctctttagcacttaatctatttaatctattccattcttccccatgttcgccgcaaaaagcatgttccatgttcccacaggtccgatcccacccccacttagctattgctgcactccggagtattccctatgggccctggtcgaaacggtggaactgccctgattcatggattcggttccaggttgcccttttgttcctttctgtctaggctcctttcgttagtgtcaacgtcgtgtcatcttagcatgtgcggtggcatcgtagatccgctacggctccctggattcccttataagcctaccttgcctagtaacgggatctgatcttcagaattaaatactctcacccgttcctgaacggagcatcggctctttctctttatcacatccactctccattcaactgcaccccacactacgtaagctatttgctgtctaccacagtgactatatactgacttgatccccctttagtcaacttcctctcttcaagcctttacttctttccagttttttatatggccgattattcctggcaacctcagcctccttcagctggctctcaatggcttccagacgatgcttcatatagccagtccaccatgcaagatctaacttgtgctttccctcgaccgaggcacactcgcgtcatgaagcctcgtagtgcaggcaacagcccttccacagcaaccaggagacgatcaacggtgaatcaaaatgtgatgcatggcctgcccactcaatatcagtcatccctggaagaagcccttctcgcctcagccgcccggaactcacgtccgatgagctggcatccttcatcggcaagaactcgcggcctttccaacccgtacatctcagatttcccttcggatagctatgccggtatggcagccgtgccggatcagtacctcaactcagccgtctacggtggtgaaaacatcatgtcatatcccatggccgacccttcattctcccccgactacttccctgtctacccaacaatgcaggaggatttcccacttccacagcaaacgccggctctcatggccggctcacagattgaccccacaatcggatgggatgtcgccaccatgtccgatatgtcaacgatgccacatctaggctccgataactggagcctggacatgctatcaatgggcaccaacatccccccgccagagacaacctgtccaagctacgtcagcgtcccttccccaggtgaactgagtggcccatcaacaccggactttctcccaatgcaccaattcgacaatcccttccagatcaccgacgagcccaagaagaccggaaagaacgaagaagaactggtcggcatgggcctctacagccagcccaacgggacactggcacgagccccgcagagtaaatcaggcgagggcctcaagctcgaagaaacattcaccccgtccgacgaagacaaggacagcgagacggacgcagaggtcgagatcattggacaccgcgaattgccacagcaaccgcccgcctaccatgaatacgcgtctaccattcgccagtcgaacttttcttccaagcagcccagacaagctctgaacctgctccagaggtcgttcttcttcgaccacgataatacggatcaacagtcgatgactgctgtgcagccttttgttggttttaatcagccctgcatgaattatgggtacgggtggatctaaggggatcctagcggagaaatttttttttctttcttttttttcggcatttctttactgtaccagcggcatagcgtggagtcatctttcatcatcttttttttctcggagtcggatacacggaaaggataccctgggacgagacttgcactagctacaattactttaggtgtactcgtacacaattcgatactgaattcacatcaatatttgctaccactcttcctatttttagtcttgcttaaaaagtactagtagtgttaatcattgtcatcatttcaagttctcgaagtatacaaactcaccctctgattggccgcggagaagataaacctcggcaaaaccatcccaaaggaacaacaattccccgaaaatatttcacaggctatcaacgcaaaaagtcaagcaagctaaagcttacgcatccggagtcgaatttaatttctaatttctcatttcgaacccagcgccgaaaatggcaaaggccattttcacagcttggaaaaccaagtctcagttgttggaagtgcgggatgagttttatcctccgtctgcgtacgctggaccggatttgcgttcccatggctgtgcagtggtatgttacatatatgcataggcgccagaatgagtgcgatgtccgctttgtatgtggttgctaatgatgtccggaatcaaaggtcgaggcttggaagctacgcggcaatgtaccgcaccatgttgaagctacggcgttgttgacagatgctattctgcatgatgatgcacagaggaattccatcttctcgattcgtgctacgtattctgcagctttctgtcggtgagtattgagccgtgcctgattcttgtttttaccttttatgagagagaaaacccagtccgattcccttgggatgatgtcttgaattcagactcctctttcacatacatatatcccgttttcaaataactaacgctccaactcagcttcgtaactggtcttgtggataccaagatccacggcgttcgccgaacaatgttccagcgcgccactgacctaggcctcccagcctccttcgtggaactccgccatgaagcaacccaccgcgagccaccgtcgctcgtcgtactgcgcaaagctgcgcagcgctcgctcgagtggctgtgggacaattactgggccggtgttggtgacgactccggtgcgcctgcattgacccatgaagatggtgcgtctgtcagggccgtcttgtgtgacgctctgcagcctctatccagcggatcggtggatcctgtgtccaagaagcggaaacgggatcaggctatttcggtagctatgcggcttgtctcggtttgtaatgtttcggcgactggggtcaggcatttgccttctgttttgcttgagcggggtttcttgatccctagaggtcgggagtgagtttgatccccccctgtttttgcttttgtctcggctgtgtgtcttcaggggtgcatatgttgtcggggagtacatgctgactgtgacattctagactcggggattcgatgaatgatacattcaaggaatggaacccggttctgcaaaaggtcgcagagattcatcctgcgttcttgagacatttgacggaagatctggtgaatgatctagcctttaaaaacacaaccgatatatcggaagatgcgccttccgaggcactgtatctgtggatcgcgcatatcttgacatctcctgcctgggagttccacaggcaatcatgcccgcagagctatgttctccgagcctgcgatgaaagtccacaccactggacaaatatgttgggagatcagttaagaaagcagactggcaagtccaagtcagttcttaccgctagacccgccaagaatcggatttcaaaacccaaacatgttagaaatgactcgcaatacgctccatcccagctctcggataagctgctggaacatggatggggattcctggagaaatgggacagtcgacctttgggtgtggtatcgagtaattagacgggctttctccaattcactcaatgtatacgctgctggcagcgttagagaaccccaaagccaatatttcccgtacaagatagctcactagtacggagcacggagtaaccaatcaaaagcggtggcattactaaagctgtgaagctatatgggaaaatagttcttccggatgacgttggtaatccgagatccacccggtcatgtatctctttcaagagctccccgcactattttgattcatcgttggtgatgaactttctaaggacacaactatttggaaccaggtcgcctctatttaggtcacaagccagagccatgcatatccaatcaattcctatgtgtatgttgatcttccggtccgtcatatatattaccaatcaacagtggctacttggtagtaatattgcaggaggaatgattgcttattctggattaattttacagggacggggaaaggtaacaactatgcctacctcgtgacggacgaggcgaccaagcagtcggtcattattgatcccgccaatcctccagagtgagttgcatctctataacgggttgaaactacatgagctgaactgattatgtggaactacagggttgcgccagagctcaagtctcaaattgcttctggcaagattgacctgacggccattgttaatactcatcagtatgtgatagaactttcatgggctggtaaaaagaggataaaatccaggtttgctgacatttgctgaagccactgggatcatgctggcggtaacgatgaaattgtatgcatgctttctcgggtcactggttgctatctcgggctaacattcgcaccagttgaaacaattcaagggccttcaagtcattggtggcagagactgcgcgttcgtcaccaagattcccgcgcacggcgaagaattcaagatcggagatcgcatcttagtgaaggcattgcatactccctgtcatacgcaagacagcgtctgctactatatgcaagatggagaccagcgtgttgttttcacgggcgatactctgttcattggcggtatgtgtatcattttcaataattttctgtcgagtgtcatggactaattggaaaccaggatgtggtcggttctttgaaggaaatgcgaaggagatgcacaaggccttgaacgagactctcgcggctctgcctgatgacaccaaggtttatgtagggttgccttttcgtgttgatacaagtctcatactgattcctcctagcccggtcatgagtatacaaaggccaatgtcaagttctgcattgcagtgtcgcagagcgagcctatcaagaagctccaggcatttgcggaccagaacacgcagacacaagggaaattcactatcggcgacgaaaaggtaagagctgaacctaagcgatattctagtcgagactgacaaaaatttagcttcacaatgtgttcatgcgtgtcaatgtaagtttcttatcttttgcccttgtataagccgttgctaattcaaacaacaggaccccgagatccaaaaggcaactggcaagactgatcctgtggaggtgatggcagcattgagagagatgaagaattcgatgtaaagatgatagtaaactagcgagaaaatctacgagatcatatgttgcgatatacttccgtagaaagcgtgagaatgaggtattccgaggcaagccggaactatgcaatccatgactacagacgaaatctccacaaatcaggtcatcaagagatttgtataactccgtagatactccggaaaatgagtgggactgtatacgtcataatcgtgccaagctcccggtccccaaatgtagacataactttcttatctcacgaacgtagccagagaagatgcagggagatgtatgcagtgaaaaataagtcgaatttagtgatctcagtcttccttgagctagtggataaaatttgagcttatgtagatgtagcttttctatagacaagccatagaaaagatacctcatccctgttttgtctgcggcccaccaataccgggagggtggggtataccaccagctatctacctactttctttcatgccacaaacacccttgacatgacacagtgacaaacagaaaattccaggacttctgcaaaacgaacaaggcagctatggatgatgtaagtgctggtggatcggagtgttgcagtgactgaccaatgccatcatagaacgatggaggggcgagtgataccgaagctcagaatcatttggaggtaagcgatttgactcccatcatagtaccatactaagtgcatatcgtcatacaggtcgtgttctatccggactgcagtcaccgtcgcaaatcctcccttgttatgatggacaagccgagggtccgatctcacccagctcaggatgacctgacgaccgcctgctatgttcactccctcattgcgagcgaatggacctcaccaccacaccacctgaaacatacagaagatgcgcaagatctggaagatataacacggacagtggacgaggctcaacccgtgacaaataccaaaggtttcgagccagatgacccggtcccggtgctcgatacggacgagaaagcgatacctacaattctcgaatcccggcatcttacgaaaagacagctatcagatatggcttggaatgtgcgaaagctatccaagaagctgggcagcatcaagctcaggctcaccgtgaaaactgtcttcgtggtcagcaaggcgaaggacgagtcgctggtaagcctgactcgaaagcttacaagatggctactttccaaggaccgcgactccgcgtacgtggtttacgtcgagcggcggctcgagacgcatccggacttcggtgcgttgcaactgatagaagacgagccctccgccgaaggccggctcaggtactgggaccctcagctcgtgcatgacaagccgcatttgtttgattttgtgatcacgctcggtggggatggaaccgtcctatacacgagttggctgtttcaacgcatcgtaccgcccgtactctcctttgcgttgggctcactaggcttcatgaccaatttcgactttgcggattaccagaagagcctcaataatgctttccgggatggcgttttcgtcagcctacggctacggttcgagtgcaccatcatgcgcagcaaagcgcgactaaacgacccacacgggccctctctatcaaaacgtgacctggtagaggagctgatcggggaggaaggggaggatacattgacgcataccccagatcgagtgcatgagattctcaacgacgtagtccttgaccggggaccaaacccaagtatgccttctcctacagtgctatgtgttaggtttcacaacagaaacagacacagctaaccaatctttgctagccatgtctcaaatcgaaatatttggtgacgacgaacatttcaccaccctgcttgctgacggaatgtgcattgctaccccgaccggatcgactgcttacaacctcgccgctggtggctctctttcgcaccctgataaccctgtcatcctcgttaccgctatctgcgcccacacgctatcattccgacctattatcctaccagataccattgtcttgcgcatgggtgtgccgtacgatgcgcgtacgagctcatgggctggctttgatggacgagacaggtgagtttgttctatatgcccttagtttggcacttgggtctgcatctgactgacacaccccagggttgagttacatcccggtgactatcttaccgtatcagcctcgagatatccctttgccaatgtcttacctcccggtgggcagggtgagggctgggtgcatagcatctccaagacgttgaactggaattctcgacaaaagcagaagagcttcaagtagctgaagaggaggacatgcttctttggcctgaccctggctctttcttcctcttcacctcttcttttatgagcgtatttggtgcctgtttagttcgatcacttgtattacagctggtggttcattgttgggcgtacatgctttctagtagaatctatgaaaaacgatatgactggggtgatggagtactagttgttagaaaataagaccaacaagatttttaattcttttagctaataattagctacaattcccagccatttgtttttttctttttttccaagtggacacttttttttttcgactaagaagctgcaggtccacttggccctataaaaaggccatcgcccggcccgaaaattcttctttcttcatcttcctcaaccacctcgctttcagagtcttaatgctggtcttgaactgcgatcttgagcccgacactttcagagtatatgtgaatagaataacatatactctacttgactgacttggtaagtttgcaacttcctttttttcttcctgcactgcattcccccagccaacggccttgcgccgttcgatgatgaaaatcttcctacattcgcagtttccacgctagccgtcgcttgaacccaatcaaggcggcattgagcggaatatcttccttggatgtctgagaactatttggctgttctttttatgaattctttgcatttcaactttgcagtcgagacggttgctaattgtctctcagaaacaggattccttcttggtcaaatctttctatcatcgacatcatacatcgctttgcagtgtgcagtctctagctctgcagctagtctctggacgcggaggtcactgctttgcgcaaatcggcataggatatttggagtgatgtgctgtgtcgagttgaagtcatagcaagaacattcagtatattagtatcaaatgaatggctgtttctacaaatatctcccaattcagatctttttctagtatctcatagccaaacctgtagtttctcagcccagaagtaaaatcttgcaagattgcacccgaaagggttgtgctccgccgtactgtatccacctatcgaccccatacgacctcaaaacctcccataaataactcaacttcaccagatcctcaagctctcaaatccgtattcctcgcctctcaatcaaattgcaacgccattcccatggcagcaccacatcgacatgccacgatgcaatcaatgagcaatggcggcatatcgtcaggtagcgacagaccacagcagcactcacaactatcacaacagtcccctgggctgcgtgtaccttcgaatcgcaagaccatctacgaccgacacctgaaccggactcgtactgcagaactcagtcgggcgagcttcgcctttctattcggggagatggtcacatatgctcaacgacgagtaacaggtatccaagatctggagaaacggtaagagacaaccccctaatccaatgcaatctcctccccagcctaaaacaaatattgccatgtactacccaacaccccatagctaacgacccctcttcccagattaaatgaacaaggctaccccctcggtctccgcctccttgacctcctcttctaccgctcaacctcaacttcctcctccgccctctcaagctcctctacctcctcttcacccccaaaccgacccctccgcatcataaccctgctgcacctgatccacggccccctctggcgcctcctcttcggccgcgccgcagatgccctcgagcactccgtgtccccggacactcccaacgaatacatgatcaccgataacgacccaatggtcaacacatatgtcagcgcgccccgcgatatgagcatgctcaactgcgctgcctatgttgccggcatcatcgagggtgtctgtgacgggtgtggcttcgagacgaaggtctcggcgcataaccagcccacggaactgtggcctagtcggacagtgttcttggttcgctttggggatccggttatggagagggagaaggtgcttgagagggcgggtgtcaaataattcatgggcttgcattcggattaccgggatatatagaaggctacaggctgatcatgtatgcttgttagcatggtagatctacggcgttttgagatgctcgagggtggttatggcgctcttagtctgcggctctttggtaatgtttgattccggcaccggcattcccttcacgaagtcatgcaagtaccagtttcgacggtcgatctgagggatttcttaccggttcttgaaatctgctgtgaagaacaatcatgtacaaaagtccttctcggccagaagatatcatacaatacaattcctccaggagaggacatgttacattacgtacatgtacatacatagaagggtattggcacattggttgctcgaaatgagatgtagaagcagatcccaccatacacattgtgatggactggcgccgtaactccaacctccaagcaggatatcaacatcgtccgttcaccagtctgaatcatcaagaactgtccactcgccgacgtttctcccgatcatcatagggcgatgggctccgcttccgcctctccctagaccggctccgctcgaaccgactcgaatctctatcatcacgtcgctcccgtcgaggcgaacgcgacctcgacctgcgccggggtctaacaacgctagcattagcacccgtcggcccgcgatccccatcatcaccaccgcgacgatcaggcataaaccgctcatccgtaacaccctcagggggcccatccctcctcctcctgttctccaacccatccccaaaccgcccagtatcctcagacttgagatccttatagcgcgtgcggcccttctttccaagcttcgtcatgtcgcgcacatgcatgtactgcggcaacgtatcacgattgacatcatcctcgaagcgcgcgcccataagctcccgccgatccagaccctccgcctcaagatccccacggaagaaagcacccttgtggaaatagcgctgcatgaagcccgtctggccgcgcgtagcatcgcggtcctccttctgcttcgcgatgaactcgctgtcttcgcgctcgcgctcctcggtggtgaggttccgccggcgctcaatctcttcgcgctctttctcgctcgcttcgatcgcttcccgggatcgctgcacgcgcttcagctcgcggagtgtccacgccgcgcgctcagcttccgggtccaggccgtccgtgtcgtcaatggcttcttcgtcttcggcttcgacgagctcgtcgtcgtcccaggcgcggttcgcgcttgagcgcgctatcgcttccttctccagttgatcgcggattaattggtctgctttttcttggcgttgtgcggcgcgttggctttcggcttctgctgctcgttctgcgtctgcttgtgctttcgtctggccggctgataagggtgcggtgttgcgcttatcttttttgatgaatgttggccggatgagcatgcggcgaggtgcttcgtcttcggaactactctcttcttcggagctttcttcctcttcctcttcttcttcctcttcatcgctctccggggtagttttggacacagtaggttttacatcgtcagtcgtaggttgtggtactgcttttggtgcaggcttgggctggtcgtcctcttcttcttcggtgacgaacccttcctcgtcgtcctcttcctcggccttttgggctgctactgcacaggctgggaatgagctcgctttaggcgctttcgctcggcgtagtgcctcagctcgtctgcgacgctcttgttctagtcgttcctcccgctcagcttcatcatcctcttcctcttcttcctcctcagatgagggctcctctgcgacagcctttccaggacggtagcgagtaggcttaacggggtttttggtcattccccggtgggaagatgggaatggaggaggcattgtgatctgatctgatatgtggaaggagggtggatgttgattattattgagatgtagagccccgtttcctagcttgcaatttaacaccagaaaattgcgccaggtttgctccgtaatatggtgtggaggtgatttgttgaactgacgttatcgaggccgaagcttttgctggatatatgtgaccacgtgatgatctgcaggagggcagaagtaggcattcactacattaactcggagattgggttcttatatctgggtagtctttctttctctccgctcaatctagagccaaataacccattaagcctacgtccacgtagtattttcagatatccatctcaaaaagtccaattagccagtttcatactaatttaatcaccacgtgaccacgcgtttccgcgcctcgcgtcgatcagccttacttattccccgccgttttccaacatcaacccgggcaacgaaaaatatcacgctcaacactctcaaattcgaagtctcaaccagagtggaaagcagccaatattcgaaaatgtcactccaaaccccccgcatccttccctctcacctccacgcctttcacccttccagcactagctcgaacaccgttcgcatactcggcaccgtcaccgcgctgcacggtaacacggggacgctcacctgcggaaccaatggtgatgtcacgctgatcttgaagtctgatgcgcgcctgcaagtgggaaagctggttgagattgtggggaaggtggctgatctagagggtggacaggtatgttccacactggctccggagggatatacttaatatctttgattcgggcttctatagctatgtagagtggatgctaatgctttgggtcttgtagggatacggaatccgtgtactgggctcgacggagtggggtgacccagctgattgcggtatgttgtcgaatgcctccctctgcgaggtaatttgggctagagactgacttgtgtgtttgtcatgaatctagattataagatttacgagaatgttgtcaatgcgacacataagttcaagagtatcttctacgactaatgggtcatgagttgatggacttgaatacatggccgtttttctgaggggtttgtcccgggtgtggtataaggctggaatataccaagagcacaagccagcctaattgttgtgacattgtcagtgccctccattagagcctagggagcagatatctgtttgaccgggcccgggatgtcgatgctgtcactgtgattctccctctgtgattccccggcttttgcattttacgtatgagattatgatcaaagcttctcccaataaaaattctacattgagctttacttataagaattgagggtggttggaatgtagttggtgctgtgactgcctaggtggctagccgtacaagtcttcggctacggagatttacacccctcatgtattccgtgggactcgtcaagtggcaagtttgaaaggtatcatgtcgtgttgggaccatctgcgaggacctcttgaaactgctatattggattcagaagaatctatcgccttaaggtgagatctctgaatggatgcattaatatctccctagagatgtctactttatatccaggcacacacagcttattactctagcctaggtaaacaactcaaagccacgcgtcttcggctacggagatttacacccctcatgtattccgtgggacttgtcaagtggcaatgagagccacgacttcaggaacgtccacgagaaagcccagtttgttgtttgatgcagacctacatggacctcatacatatggtaatgttatggtccctgtggtaggtgaagcagcatgtgctacgggtccctctgcctacactgtctcatggtgctacggtgagatggtggtcagagggatgagaggaggaagagagaagaagaggagaagaggagaaagtgtagggggagctcttttatattgtcacatcccacgtgcctgcctaaaatcgacggccctttgctcttgccattgttccctctcggttattggttgtcgcaggtgactatacggaaccctaggttacatatagacactgggttgctcttgccttctttacctctcgggcagggtcactggattcaaccggtgcctaggtaaatcattttgttaaagcaatctacctacaaggcagggcatgattattgtgatttgatttgatttgattccgtacttcgtactatcataagagctacataaaaagggtatccctgacaaagaccaccacttccacccaccaggcacagcgaatacagcatcggagtcctgtcaagatactccaggtcatcagtttgaacaaataagaaaaggtcataagtctcaaggtgcaagtcaggaaccgttggctgtatgcaacgagatctacccataaaccgaacgccatcgctaaaagacaacaaaaaaacaaataaaagaataaaaaagtaaacatgatcgggttgatatgtggcaaaacattcataaagttactcccggtctaagacaaagaaggtggctattgcccttcggtgtctgcaccagcgggctggctcttgggtgcgtcggtggtagcgagagcatccgaactgaagaaccccgagtcgggaacgataacatcgttgaagttgaagggaaggagatcggggttgaagttgtctttctcgttgtggtggtccgagaatagagcgttgagcagctcgttggcaggagtttcgcaagatccagcaggggaggcgtagtccgttggaagccactccgcccagttgtcaccagcgaatttggtgttctccagttcgaagaaagcttcggccttggcagcatcatcgaaaatgtcgagaaccatgccatcaaggggctcaaaggtctccggaagactgtcgtttgcaagctgtggtgccaaaggctgttgcttggccggggacttctgttgccgtggaggtgactgaggacttccgtgaagtgattggatacgctgcaggcgctctgccgacagtcgcgctggagacataatggagcctagatccttacgtttgttgaggctaggggagtttgcgggcaaagacaaacgcttgtcaatcgcgttgatccgcgggttccgtcgacggggagtagggcttgctgaatcgaatccgatggagggactttcaaatagatcatcgaggccatcactcggggtgggtgcaaggttctccttctgctgattcggcttgtcatcctttgtggaggcaatgcgagggctgcgacgtggagagcagctgttcaccatagaagaatcaagctccttcaaagggccttcattctgaggattattgaaaagtgaccttctcaaaggcttgggggtgagactgttggcatctgtcactggagcagagcgggcgtgcatacggctcattgggctagacttgatggcgcgtgacaatacctctctagcgtcctccttggaccaacggcgtcctggggtatcaaacggcacttccaactcaggatcaggactaatagatcgagaagactcgttgggagaataatctgcctcaccgtcctgatcatcgtcgtcgtcattttccatgtggggggtctccccatcgggatggatggaagacgcttcagtaggtgctggggaggaagcggaagacttctttggtgcggccttgctccgagttctggcagcagggcaggacttggcctggccgtctgcgcggttcctcgaaggacgctttttgttgttctttttggtggccggcttcgctgcccctggcttggtccatttgtcttccgggcgcatttgtttgaatttgtggagccacaaaccacaaggattgcagaaagtcatctgatcccaatcattatcgtcctgctcgagagcctttttgtaaattttgaagcttttcacttcacccttgtcgtttcggtccacgggatcccaatagagcatgggagaagacctcatcatatcctccgcaagactctctccgccattcaccgttttcacccaggctcgccgccagctggcggtttcgatggagccgcaattctcgcaatagggcggaatcagcccgttgagaatcgcattgtccaagcgtgcctttatattctttggcaccgccttagtcacctgcttcggcattgactttggcttcgaggattgtttcgactgcttgggattagaaccagctgtctcacacggcatgaaagtgacatccacaggcccagtaggccgaggaggaacaatggggtcactagccgggattgcacgaaacatttggggaacttcgtggaagatatgtggtgccggcgcgagtggttttagcgccaagcgttgtccaccagaactcgaagaaggcctcgatgcggggcgggactgagcggggcgagaagggggagcacgagataccgaacgcggtgcttgctttgcaatctgctccgttgagttatcatcgacggggagatgatccttattggtcccttgtgcggcactgacaatgctgactggagagcatggctgcacagtagaacggacagagcacttgtctcgagttatcccacgagacacttccgttctaggatcgcctaggggaataaccgagtcatcgtctatggtctcgtccggccctgcgctcatgaagccggagtcgttctccagagacatggtaggcaacacagggcttgatctatttggtaaccggctatcgaacactggaggagatgatggaatgttggaggatggctcgaagagaccttggtaacgagtatcctcgggagaggggccgccagcgtctgtggtagggatgtcatcgctcatgcagtacggagaactgtacgaagcgggacatgaggcaatgctaatgctcgacgactcccgcaacaagctagccgtgggtcggcttcggcgggggaaatcagacggccgagatatgggggtgggtggacggacgggctcttcgtgtgaatggtcgacggtgagagcggggtttacaggagttgggcggtggattcgtacagaggccgccgtgctggctgcaactcgaagcgaacttggctgtctttcgatgttcatacccgactttccgggccagcttgcttgatacaccttggccctcttccgggcgggggcctccgttgattcctcatcagcactgccgtaccctgactgaatggaccctcttcgggtgttgttttgtgagacgtgtgaaagctgggtctggttgtcgcagtctcgcatggaggcacttgaggatgggcgaatcatatcgctatggggaatgctctgcttggggtaggattgctgatgagctggtgttcgacatccaccaggtgttgacacccgactgccagcgtatgagtgtgaaggcgacaccgagcggaccgatccattgtggtggaatgtagcgaactctcgtggtgtggagccttcgctcaagagctggtggaatctctcaatcccagattgatggatcggggatccgatgttgtcgttctggctctggcttcttgaggattccaggagggcggggttttggcgaataaaatttgtccatgattgcgtgtcaaagtcgcctgaattgccattggtcaacttccgatgcttctgcatgctggctaagtactcactctgggtgacagttgggacaggcaccagccgtagcttgacctccaacgtctcttgggcacctttggagaagagaccactgagggggctcttgcaaactcggccagtaattatggtcttcgactggttgttgggtgtctcagtcgccgatgagaaggtggccagcaccccagaaagcatgccttgcccgacaagaggggtttcgaattcggaatagtcgtaggcatagacggtataatcctttcctaattgacccacaagctccgggctgaacgaggaactgtgtaagtatgccattttggtcatccggggaagaggaagtcaaacctagcagaaacgattgcctggatgcatatttttaactcgatcactccaaccggagtgttctcgtctagaaatgccgtttggatgtcaagcacgtgtggccaccgagcaaggcaattagttttattctcgttgtcgaatgtgtaaagaactttcactgtatgatgaccatgtttagctgccattcatcgccctcattatatcggtaatggaaaacatacgcctcatagggcggacatcgataccgtcctgagattccatctcatcagcctttgtctgtccaccatgcaagacggtggatcaaattctggggttgaaatgaatggtagaggctgaagggtattcaagtatggtcgaagtaagagactcgaggttcgaagatgttgacaggtagaaagaggggggagcggagcgaaattgtcgatcaaagaaagaaagccctttcactcaggatcgggaatgagtcggcaattattagcgagccagccgatcagcggtgcatatctaggatctcgtcgaccgggagaatggcaggttatgcaggagtatgtagtggcggggtctttttatctgcaggcctggaattttagcaattgtgaatcccctcgcagagggaacataggcatggaaaagcaaaaagcaattcttaccaattaaacagggaaaaaagagcaataatctctccactagctctgcatgagcagacaaaagtggaagagagacgagtgaggaaggggtgaggttaaggagccttgcatgcgcgggtcaagctatcacgaaagatctccaaacaagcgtgacgcgacgtgactgcggccaatcgcgacctcgggaaatggccggaagttggtgcctaaggcctgaggcgcctaatattttcctcaggcgcttgtgagaagcttcacgtgacctctgctctccgccaaccatcaagatgtctgaacctacagcatcttctgaatcgactgcatcttctgcatctcctgcatctcctgcatcaaccgcaccttctgattcaactgcatctcttgataccagcaatctttctgagcccaccatgtcgactgctcctgaagtccagattcagtatgcttccctatcaataactcttagctccattcagaaccaatcatctaacaagccgactagggaccttctgaacaagccgagaagcgagctcacgtaagtccactctttacaattgatttatccccttcccttcctatgcgacctttctcatcctgagttatcaatggtctcttgatcgggagtttctgattctcgagcttgtggggttcgcctacgacgcccgcgtctcggaaactttgcgaccgacttcttcacatcctcatgcaagctgcgcaaagtacatacagcacataaaactaactttacatcttgcattttaatagtgaatatgaggtctctctcgtcgagtcgcatgagctcagcgccggccccctgtcgctcctgctgaccgccacgcgcacccacacccaggtcctgatctcctgccgcaacaaccgcaagctgctggcgcgtgtcaaggcttttgatcgccacttcaacatggttctcgagaacgtcaaggagatgtggaccgagtaccccaagggtgtcaagggcaagggcgtgaacaaggaccgcttcatcagcaagatgtacgtgaaccaaccgtggacggatcttcgtccctctttgctatccttgaaacagtttctaaccttattgccttatctttaggttccttcgtggcgactccgtcatcctggtcctgctcagctaaacgcctaatgcctcacgttgacatgatccctgctacttgcacggcatctcgaacccatgaacattttccatgggcaagttatcatgtaatcgatctcgataccctttgttctttcttttttccctcgcgtgcttttcctcccttgcttctagtccccgccaagacacgattggctaaggggatggactaaaaagacctttcggcgttaagttctttgcacgggctcctacccgttgcttttttttcaaagggaatcctcgggcggcgtcaaattagggcagagctggttagcaatgaatcttacagaaagatcttatggatactacctttgtagatgcttgtaagctagtaggtcaccttcatccatagatagatcttgctttttgtacttcctcgagctcgtcagagatgtctcatcccttggacattattaagggttggattgttataccttattcttcgccatgtacaactacaagcactcaatgtatcaaccaaataagaatatcattatcatcaatgaccatatctatcaagagacaatcatgaacagagagaactcggggccggatatgccgctatgtatacgaagaaaccacctagagaaccaaatcctaaacagcctcagcaagccccgtcaaaaactgcgacaacccaaaagcgccaggatccggaatcttcccaagccactcctcctccccaccaacataaacactcctcccaagactcgccttcatatccttcgtagactcagtcccctgccgcgccgcctccgcagcaaccctcacatccccactctcaagcaacgaatccacaaacggcgatagcgcatcaataagcgtccgatcaccaggcttagcaggcgtgtatttccccagtgccgcaaacgaagacttcagcgccttcgcccacgtctccgtcgtgatcgccgtcggcgaggtggtgttctgcgccagtaagctgtgtgcgagcgcgttcaggaagatcgcgtagatcgcgccggatgtcccgtccatgacattctccacgacgatcacgatccgcgcgacggtgctgacaatgtcggtggttagtggtggggaggcgtcggcgaggaaggattggattgcttcggcgccgcgctttagtccgacgccgcagtcgccgtcgccgacgattgtgtcgtaccgtgttacttcgggttcggcgtcgatcacacgctgcaggccggcgccgaggattttttggagtatggttggatcgactgaggttgtttgggttagatttgtgttaagatggtgggtgtgatggaaaagcttacgctgtaggttgctgtggatgtcttcggtaagattggaggtcttcagatccacgggggccgcgttacggttgttttcccacgtagaggcactgatcggggcagaccagccgactgcctcggcgggggcgtcaagaagctcaagcatagtagttttcacgcccaggcctgggtcgacgagcttcatcagcgagatgctgaagccgaggccgttcagactggttaggaaagtgccctggatcacgcggaccatgttgacctggtagtcgtgctggagctggcggtagacttcatctgtgataccggccagctcgagcgggctaacaccgccgagattgttgattagcagcacgaattgatcctccggcttgcgggtcacgtagcagcggtctgggtcgttgtggtcgagtagctgtagaagcataccgcggactagctcgacgaggtcgaatttcacgcggtgcgagcccggctcgttgtggattcccatgccgacttcaacctcgccgtgcgggatcgtgtcttcgggtacaccacggcctggcacgtggacgtgttcgagtgatgatcctagtgagactagatttgcgttggctagctgggctagagcatagaggtcgtctagggagccactgatgaaggtatgttagcattgattcgatttctgtaaagtatagcatgtagaccatgatatgtatagactcacccagcctcagccaatgcaccaaccatcttcaaaatcaatacaccaccaccaataccgcgacgaccaaccttcccacccttctcgcgaccaacgccaacatcatcattgatagcaaagaattcagtcttgataccagcaacacgggacttctccgtggccataccgaagttcagcacatcgccggtatagttcataggaatgatcagcacgccattatcagtggggacacgatcgataaccgctctgcggatctgctcggccgacggcgaggcaaagatggtaccggcgaccgaggcatcgcagagcccgtggccgacgaagcctgcaaatgcgggttcatggccggaaccgccacccgtcacgatggagaccttgtttgctctgcggggcgcatctggacggcggaatatgatcttgtgctgttggtccagggccagagatgggtttgtgagtgtaagcgagttaagcgcagtgagaaccaggtggtctgggtcggcgaagaaatgtttggctgggaaacggtcagatatgtggggaagatctgggggatcagaggtggagcgtactctgcattgctgatcaaaagtggacagtttcgattgggtataatttgaattgaagagctgacggagtttgaggttttgagtattttaagagagtggtataatgtttctcgagtgtaatccaaggggaacttgtttgccactggggtatgaggcaagattccaagattccaagattctcaaagctaacaccagcgagaagctctcggattggatttgaggatctttgatggggaaaaagtgggttcggtcactgggatcttcaagactcagggtaacttgtatagccaagtatgttgtatatatactgttgagactcacgttgtacggaatatagtcggaagtgtgggagtacaggcactccctccctctttaaggaacccgagcatgtccattcatacaatcaaggacgtgttcctttctttttcccttttttttccagctcacatgaacatccaaggtctgatctgcgcttcggcttaccctctagggatatcccgccaggcaccgcattccagaaaggcgtcttctgtcgtccgaatgggcgttttcaccagagaacattcttggaatggacaattcgatgcatccagagctgtgcaatgtattctagtccactctcgcccgagtggactttcttggacctcaacctggtaagtatgccggcattcctggtgcaccgaccacctcttacttgcttgtatgagttatagatattgtagatgtattctggtatagttattgtagcctataggctttggtctcggctttgatagagaggtccctcttaatacctgcaatagtatctcaggccaatgccaatgtaaatacaaattgccactaggacgaataccgggataccgcaagtcttagtggagacatcatgagactaacgtacaaaagggacagccgaactcggatctgctgtcagatccaggactgtggggtatatgtatagctctaggtcatggggtggtcctttgctcgttgatctcgcagggttatgcttctccaatggggttcgtggatattagaagcattcggatactatacatccactatcattagtattccaactacctcggtgaatatgtatagcacggatttcctctttggtctacccccacaacacgaattctttaattaagggccatcggcactggccgagatcaagtattgtaagtggcttggtgagaccggagttactccgtttttctccaaaggtataatcaattgccggatcccccatactaaataatagtctccctaaataatcaaacatataccaaacactccgtacaaatgtgtgcattcagtgaataaagtacctactctcaacatgtaaaagattatgccttatgacacgtagctgtattgattagtgccttctttgcgctcgagatactccttctcgatcaacctaaaagtcaaaacaatgttagacacaataaccgggaacaacgggttgttagtaaggaggatacgcacttctcaatctctcccttaatatcggccggctgaagcacaccccgggtcttagtagcactgataacctccgcgatcagctcggcgtggctgagggtcttgcggcccttcataatgcgcacgatggcagcttgcgtctcgaaatggcggtcggcagcaacccgctcgtgcgtcgtcttggtttcctctttggtctccttcagctggatctggttgatcttgatgcgcatttgcttgtcgctgaaattcgcgttgtacgagaatttatcgctagagttcacctctttgcccttagggtccttggataagactcggtacttggcgcatgcgagagactggagcgttcgtttcaattccgggtccgctgtgtgtcatgttagggattgttcaacttttagagcgctgtggatccacttacacaatccggtcgcttcttggatctgggggtactgcatgctctcgccattggggatatcgttaaagagcagcaacacaatcgcctggaacgagctgactaccaggttcttctttccgagcgggaagtttgcagtcagctgacaatgcgccagttgatgtttccaggtgagcttgcgtcctgtatgtttgttgtggtagaacgtctcgaatctgctaatggagcgtgcgatcgtcgatggaatccgtacgggtacatcgggatatgtcggccaggaggcggcagagagcacgctaacttcgaattcgaatcggctcctgcgctcgtcctgctgtgaccgtctgaaggccgtcatttcatcgttagcagtgtccatatcgttgaacatggactcaaggttatgagtgaaatttgacccgcattctaaccaaacattagccaaagcgcataacatatggatcttggatgcgacaaaccgttcttcaaacgagttaacatgctcttttccgcatcgttgctcgcgcttcgtttcatcaaaagacgccgggcaagatcgttcttgtaaaaggcttcaaagacagcctttccatgtacgaatcggaagaggtcgagaacttgatcaagctgtcggtcaagctctgcatcatcggacatcaggcttacttcctctgggttacggcctggtggcagcttgtaaccgcccttaaggagcctatccacgtatttggcgatcatttcacccgacttgggattgtcggtaccacctgtagagtccatcttcttcccgtggttcataaaggtaccaaaggcgtcgcggaccgtgtggcccagttcctcattcgactcaaaagaatcggtgcaaatatcgtcaaccttttgcttaaattggagcaggtgaatgaccatgtcggcctccagatcttgattaaacacgatgccctcaccctcctcgatgatgtacttcctaaatgcaggcttcaattcgagactaagatctcgccggtcaagcaaaccgtatagttgcttcaaggcagtcttattgccggctcgcatcaagccaagcacttcgttttcgttggtcaacacgtccgttcgccgtgtcactagagtctcatccaggagattggacagtttgagcttcgtgcttcgattgaaagagaagagaccacaccgttctacctcacgttcgatcaactggtgggaattatcgacgtatgcagccagggaccctgctgcttgttgttgagaccactgcttcacaaactcctcggacttggccatgaataaaggctcaaagtcactcccatacacatcgaggctgtggaaaagctcaatagcatctctaagcaaacttgaatctgtcaatgcctttgtaaatccacctcgatcggcctcgatcaaatcatatgctcctttcacaatctttggcttcagactcgcatcagagaagatgtatgaccggaactgaatcaatcccatttcacgaatcaccggttgttctttagaatgcaagaggaacgactggtcgagataatagaagatccagcgaatagtaacctgggggagagagaccgttagctgtgaacctccattcgagatatttccttgccacacatactagcttggagtgccaggccgaccacgcctcaatcactatccgcaatgtaccgacatcagtgctacctccagctctggcgacaagattcgtgcgcattttcccgctgacgaactctttgcaccgatcctgaagcttcttagccaacaaagctgcccgctcctggcggcagacattctccccgcccttgtatagctcttctagcgagctctctggtttcctgtcatcaaaaatagccgttagagccgcatccaactgcgaccacactttatcgaaatacgattcctggttaagccgcggtccggtacgaaggttcttgacgacgagctttttcgcgccgctatgaggagaaaatgtgttttggcggatattagtattcaagccatgggatctgatgggaccatttaacccagagactccccgacctggcacgccattcttaggcggggaaccggaaatcggatgcatcttatgcgggctcgtttgggttgaggagcgtgagggagacgacgacagacgggaacgcttgtgggtttgcagatcaaggctgcggtcgggtgaatacctctgggagaggagctcggatatggattgttgcgatcgcggctgcgacggctctccttgatcagaaagcttcctcttgccgattgattggcgcttaccgctctgctcggtgtcgcctctcgagttctgcggcatctacccggttcagcccgactgggaatttggggcactctcaacaggctggagatgatgaacaggaaggaaagtggattcgggatgatgttgaggggaattgacgttgcgcttggctttggctccgcacggcgataagatacggagctattccatcagacatggacatcatcatcatggatgaaatcatttcggtgtatatataatgtactaacggatattcaaataaagagccaggtattattgataatctaggtgtgcgaaatacgatatggacatcataacactcgcctcagccattcaggtgtccgtataagaggccatagctacacgactacttatgtacgtatgtatcaaaagcgctaatgatcataaattcacgctgaaaagaagagagagttgtatctagcgcgggtttttaaaagagagaacaggcccaaggccctcgccaacactcactctcactacagcatactactacggaatacgaagtacgaacagggttagtcctcaccgcttgttgatcattgagcattcgcccaagagctgggcatatatacggggtattatatatatatatatatatccctaagttttgaattcattcctcgactctaggaataagtctatgagaagtagatacaatacaacgcacattgaaggccatttatgtatgtaattcatggtacgcattcaagtaatgcaacgctgacaagtacacgatcatcaatgcaatgtccacatgttgttgatgaggctttatcttttgcaaaagactgcgagtgtgtgcaatggaaccataaagaagacgtaaactcataaaaataatcaagaaagaccaatcaatcaacacgcggaggacttctcgatttctttcccataggactgccgcttgttctagaatccaatattagcttcttgcttctactgcattgtgcagctaggtaaccaagggtgacatacgatcgtcggcgctcgccttccttccggaacccttcaatgatcttggccatctctttgcgagacgcattggcatcgatcttccgtcctccgagactcatactcaccttctcatgtgcgctcgccataagcaaccgcttcatgagaagataccgcatgttcatacacacgtacacgccgcagtcgctgccgccgtcttgctggggcgaatcgttcagatgcaggaacctaatgggcatgtttaggaggtatccgaatttgcgagtcaccgtgtctgcctcccagacgtttccttggtatagcgagtcgtagtgaaatgcgatgcggtcgacgaccgagatcaacaggagggaccagtgcgtgcctccttctgcctgggagacgttacgacagtcgttgatgggaaggaagacatgggttgctcgagtgaagtccgggagtgcttcgcggagggtgcgtggatcgggggtttggaggatcatgaatgacatgctggggcggagaaggatgatattggaggattggtatcgtgaaagaaattcatgttcgagatatctagagcaggaaggtcgaggatcagtgccatagtactgtgaagtatgtcggaccgactctagggacttactcctcccagaatgagatgatctatgacacattagctcatgtcccagctagaaggattctctcgccattcaaacccacgttgtctgtgagccagtcattcttgagagtttgcatgtcctctcttgtcactgtttcttcgttaactacctagtccttttcgcgcttcggggattgattccatacatcgcacgtcgtaatctatgagcacccaaaggcgacctgtaagcatcccgtttgctattcaccaaggcggcaagatctgttctaaacttacaactcaaaaatgcatcatctgggttcaactgcgcaagtcagtaatcgtgccgctaataccgaatcaagcgaaacccaccttatcgccaaaccggccgcgcaccttgcgcaacatgacggcaatatgatatgtgcctttcagttgatcacaaaaccgaagtcaggccgctagaatatgaattccttgaaagccgcgggaagagaagctatacactgcgccacagtcgagaacgcaatacgtgcacggtgctaggctcctcagatagccaagccagaccccacaaatcgcggttatgataaacggggcagatctttgcgcaggatttgagagttcgggtgccccgcgcgcacaggaaatgagatgcaacctacaacctcgtttatgcagtggcaagcaaagccggatgcgaaatagacgtcggcaatgttcaagtaacagactcgaatgtgtcccccgtttctgcactggcggagtagaagtgggaccggtcggcaactcgggattgggcggcgcttcggagagggaggccgtcagccttatgcttatgggtggcggagaaggaaggcggaggatggattgaatgcttgaatgctaatgctattttcaattgcgcttatggacaatagctggtcgagtggtacagagtatgctgaggggtacgccaaggctgagagtaagtaagtcaggcagtggccatgcaagggaaggttagactgaggctgtgattttcctttggaatgatgcaatctcggacgcaggaacaggagggaggtagcgatgaaaacacaagagggacaaatccccaaaagaactggactcaggcaggtttgatcgggctgcgtcacatgtggggtcacatgatgggtatactaaatcaggacttatgttaggaagcattgcgaggtagaaatgtatgatttagataagtctgcaggatttattaaagaaattaattcataagaataaggggtatctaaacgtgcatcccagagctccagtagaagaagaggttcagaccatgagctgagatgagaggaagggaacagagatcgcataaaagtggaaaaacagagagcagatcgaagagatggaaacaaggccaaagcaattgggatggacagaaaagaaaaaccataaatcatcagtatgagatgacgccgaacgaaacaaaagcagatcaaagtgacaaagcagcaacattgcaactggtgtagtcgcctttgttttgccctgttcttcaaagggtatgattttgaagaaatatgaagacagattagaaaaagaaacattcaatatgatcctgtaatatcctgtagttagtatgaaaccgtgtattgtgtgtttttcttcttgcggatttgaaaaatgattggcgaatagatcgaaaagatggcgtgagattgttgattcaggtgctgagtcgggcaaaatgtttgttccaaatccagccaacggtcctagtggcatcgtcctgattgcgggcaagccaaagctcacccttctcgcctatgacgtcgaagatatccccggaggcgtaggtcagatagggatatccgccctcagtgcgagtgtcaatgtcaaagtcataaacactcgccgcgcagaacaacgccgcagggcctatgggaggggcgctgcgttccgggtgcccatttacagcagtatcacccggcacatccgacatgggcatggcggacgagaagaatcctgagtatcgatcagtcggggaggctggcaggtagctcgagtgcgaagagctattgatcacatcctcgaggaaaggtgtgtctaggctgagtcttggcagtctagggaaaggctcgatgtcgctggttctcttaagggcgggagcgctggtgacttgttgcagcagttgattggaagtgtctgggatgactcggctagatagaatggaattggctcggtaacggctgctgcggctggagtggctttccatctggggagactggtatgattggctgccgatgctgaaatcccgggaaacgttcggtgaatcatcggtcatagacccaggtcgcgtcttcgagctgttcaccgtagaaggacgacgaggcgacatagaattatgctggtcaccgggtgacagggggaccaaattgagggaatgagccatcatcgccccgttgcaacaacttagctcccccactcgtgcctccatcaaagtgtggtcactattgaagtcgctgatgagcctgtcaaggtcattggggaacaattccacatgagcaccaatctttttctgtagaacactgtaccacacagtttgaatttcgataaagttcttcagacacgctgccatcagtttggaagtcaacgcgtagagtttaggcaattcatcctttaaggtatcattcaaagccaggaactgctcgccctgctcgacggtcttcttgtcaggtttgtcgccacggtccttgatggctttgtagcgtgcatattccgggagtcgcttgtcgcgcttccgcatgacccgctggggtgcattgtaaagtcctagtagttcaaccatcggatcaatgaccgttttgcggacgacagcaagctgcaataattagtgttgattcaataaagaaacatgacataacttacatgttctgggagagcagtcgtcacaagctcctgaactgtcatcttgaactgatgccacttgctctccaattgtggatacggagaaggcgacatgccgatgatctcttcgatcgaatcggcgtactcgttgaactggttcacatagagttgcacatcccgagagtagctctcagcgtcacgcatgacaacctgcaactggaaatagccgtcgctaagtttctgcgctagcaaatcataggttttgtcttcaaacaagtcggagaggccaacttgctgtctaaacttctccgtgcggcgaccaaaggctttagacagaccggtacgcacatcagagtggttgcgctttcggccgacagcttgaccaacgaggtctactcgtttcttcaattcgttgatccgatgagaaacattcgtgacctcttccagagcattggaaattgccgcatggtccgggtgatcttttggcgtggactccaacaggtcgcggagaataagggggtacttcaagattctttgcaccggcttaacgagcaaagagtccaaatcccaggcggtcgtgagatccatagcacccttctggcattcgctcagccaaaagcccacctttggaatgcgctgcacgacctgaagtttcttgtttgcggcatcatggtttttcaggtaatcagtgtacaccttttccatctgcgtcatgtgggcgacaaaaatctgaccaacaaaggtcgcgcgatccttttcgagttccgacattcctgctgcttcggcgccttctggggcaatggactcggcagcctgattgttgcgctttcgcttgctgctccatctcagagcctttggtatgacgtagatactttgagctgcttgtttgagatcagacaagaacttgtcggagaaggccgcgacttggtcggaattgccgaagagaaccttgacatcctcgggatccaataccgtgagcgaggtcctcttgtagatgtcctcaatgattatcatatcatgaccaaaggtgtgctccgtatcaacaagttctttgattatgtgacgtcgcttcttgagacgtcgctgttccggagaaggcgaatccttcggctcaacccgaatggtttgctcggtggatggaacaagtgaagtagcggaggagtcagcggcctcgggagactgaatagactccaaagttcggaaagaagagtcatggctgctgcccgggctatgtcccgcggctctaggagcagcctgggtactgcgactgagtccaatgtggctcgatgaattaagcgaattttgacctccaagaggttcattatcagtagagtgcatcgttgagggcgagaggaatcccgaagtaaatgcatgaggcagagtctggtcgttggaagcttgagcatcaaccgagactcccaggccattgtttttgttggatgcgccagcatcttggtttgccgaaggcactaggcggggggtgagtaccccttcagtgcgcatgccatcggtttcggtgtcgggggttacagcatcatcttcggctgcgatctgcatccagtccatgatggacggagacgcatgttcccaatcatcacgtccaaccaaactagctgtgtgtgagagtgtctctgagtcatggaaatctttgaaccccggcacgactaccggatcctcagttaggctatcgggtcgcccatctgcacgtgtatctgcaggatgagatcgaggctcggacgaggggtaaactgctgggccaaggtggtgactcctgcctcgcgtcaactcctccagatagagctgagtggcacgcttcgaatcccatctgcccaatctagctaagcttggtggatcagaaaaggcattggatcgaaactgttcagatccttgaagtgtgctcggacccattacgccgtgatcctgaattgaagctggtgattcatcgtctaccattgaagctggccttgttgaaacagccgaacaagtttcagttggtggttccgtttcacggcctcgtagcagagaatcatcaccactctcgtcacaatgctcgtcacaggtggaatcttggtgttgcccagatgaccaggaactcatactccatcggttgtgaagatcagtttcattttgagcctggtgcattgacgcacgctcaggctcttgagtatcattactactagaggaattgtagtaaggcgtatctccaagcataatctggatggactctctgtcgtcattctctgaaagactgcaatcaggttcgtcgcatgagtcgtcgctccggttggacccgcggatttgcattatatgatccagaagagtttgagaaacgctgggattgcgctgcagcagcccggactggggctccggatcaaaagtagtgacatgggtatcaccagagtctgatgtggcacccgaatctgtcgggtcatcaacggtaggctgtccttcacctgaagttgttgaatctacaccctgtgggaggccaagagtgggagagtccatcgttgtgtggggcgctgccgtatccgatgccggcagggcagtgttgaggtgcagcctaggaacggcttgaaccccattttcgtcatactcaaccgagccggtcgagtctttaaccatcgtagccatctcgtcggatgacggggcgtggatcacaggcgggttaggggtaattgtaggttcatccatcgattgcttgagatcttcattcgtctcctgttctcgcaccgaagcgtgacgtcgaagctttccagcagttgatttgttcggtcctctgtcattctgattctcttgaacatccgagtgtcggtagagtgcctgttgaatgtgccggcgacgagcatcaaaatcaaccttgaccaattcaggtaatttgcgttcaggacgagaccgcgagttgttgtaagtagcgtgtttttgtaaattcaaaactctatccccgattttggagcgtggggagaccgcagcaccatgtgagacgggttgtcgaggtcgtgaactgcgcaacggaggcgactttttaggtggcggctcagcgatgtaagcttcaagtcgccgactggattcagataactgattgcgtgttcggccgattgttagatcccgcctaccacgcgggttcgtcgcgaacgaagcgggatcatctgctggtatgcggggagaactttgtttaggtgacggaataggaaggcggctgccgcccctgggcggcgaggtaatggcagcggatcggctgctgaatgttggattggaggatggggataagctttcggaaccggaagtgacgaaacggtgcgagcagacaggaatgcgcgacttggaatttggactgcccgggggcgacccatggccgggtttagtctgccgcaagggcgcaggtaccgccatttcaggattccacggatctgcaaggggctctcttgttctatccaaatcacttaggactcggcgatgtttgccggtgctatttatcccggcctggactgcctccaaagaagttgtgtgtccaagataccatgcagtgggcgtgagtggtgattttgcaggatattgatcgagacgctcacggaaggctgggttcgggcttggaatacttccatccgacccacggcgttgttgtaaacgcgatatggcaccgttgttaacctgtgtgttgataggcgacagttcaccaaacaatggccggcgagtatgcgattctgtaatccgttgaaacagagggggtggaatagcactatttgtatctagggccggaccgattctgtctatctctggcgacgacgggttcgaatccgctggcgctcgagaattgctggtgatcgactccggtagcgaatcacgatactgacgacgccgtggcaacacccgatttcgctctccgtcaacacttccggaaggactcggtgctcttgaggttggacgcgaaacagatggcaaagggaggacctgatccgtggttttgttgaacttgttgacaagatctttgaacgacggctgtcgtgaccttgggttcacatgcaacgggggtatgttgaccgagggagctcctagcgttggcgaatccgaggttgaacggtatggttgacgtctagtgcgcgatgactccaacatggttgttggcaggggtgatactttgtcatcgactgaaggatagtcggccgcggccatgcccattcttacatcaccaaacccctctcttacattggatgaagtgcctggcagggatccacgctggcgataataatcagcggggtctggagactcccgtcctctacaatcttgcaattgatcgcccgacgagaggtgattcgcggaagtagaggaattatggggtcgtatgaagcccgacgatagtggagcatacgtggtcgatggttgtgcctggggagagaaggagacggtcggcgagtcacctaaagaagtggtagtgtgaccattggcagattggccaaatgccggagccgacaattgtcgcccaaacggaggtgggtggcgataccggacatcaaaaccctgctcgtcaccgccagacatcttgcatgcttcaggccgacaggtcgacgtggactggtcgcggcctttcggttctgggcgggttgcgttggtgcgttgttccgggatggtcgcccaacgggaatgtcgcaggtgagtcgattcaggctacaaagcaatcctcctgggtggcgcacacccattcagcattcatatttgagacaactcgccaaacaaaaaaaattcgatatcgaggggatatttccccggtcaaagctcgaaaggtaagattgttggatggagttcgaatcggggggatcggggaagagtagagtggtgagatcgaggatcggccagttgccgaaattaaactgtcgtgagagagagaacggataggaggatcgagctccagacggatgttttgtttaccagccgtggctgctgataggtgttggaacctggtagttgaggggtttcaaagcgaatcctgactgtgggccagattgctagctctccgggccaatccgtgttgacaggctgacctgcactagtgacaaagaggtgttgaagttacagtgtcgatctttgaacaatattttgtgatgggtggaaagaaagaattgtgacgagttcgaggaagaagactcgaggaagagggaagaaatcaatcgggactagtggatgatatgtttaaagtgaaactgaatttgggagtggatttggcggatgtggtggatttctttgtctttgttcattgttcagctggatgttgtactgtacgtggaggaatcctatatatcatttcctcggcttgtaccttttctatacatcgcaaatacctcgactacacatccatcacaccagcaataccgcaactgacaggcgtatacctccgtattgtacctcgacatcccccaggaacaagattaatctcccggagacccccatggatgacgcagtggagacgcaatggccagccctggagtatctagaccgccccgttccatggttcgctccgatgtttaattggtagctttgattggttcctgatttcctgatttcacttacttttccacggaagtctcttattgtatgttgacatctatatacttcggagacttcagagacttcaacggctcatccatggttcaagattactgatactaggaaggtgtcgagttcgagagcattcgcgtatccgaactttgtttgccgcgcacacttgacgcgtcgcgcgaacccatcaaaacttatgttgtatacgcaatgaaccaaactcacagggatccgaaaaaggaattacacatttaacctgagaatcgcctctcatgggcaaaaagaggaaaagacccatcaaggaccgcgggtccacgtcctcgtctcacacgggtatcaccacgtctccccgccgtttcaggcctccccatgcgccaattcccctgggaacaaaaacaagccatcccgttatctcgctgtactaccgaaatgtcgtacccttgcgggagtacctgctccataaacttcccgtgacctccaagtcgcgtcggcgccgcatcctgacattgggctcgcgggaagaccaagggaccaatgcacaacttcaaacgtctgagacattggcggagctgctagactccacactggtgggtgtgctgaaggaatcgtctccgacccttaattacgaacgacaaaagcaatactcctcttttaatgagtctcaatcgcggtcaattctcgtcagcaccgataccgggccgacttgtccccaatcggaggtgagcccatgacggccgaatcatttacaggtgtcagattgctgatccttgtcgcaggtggttgactttgtgatctggaaaatcttcaatcgtagcaatggctactctaaagaggccaagcatctgctgacgcatggcttcaaacgcatgtctatgcaccatgctcaacacactggtattccaggcatcgtgtctcagtttccgaatcagaatgttcaggttctcaagaagggtgcatgggcagaggtcctgggcttgcttggtagtaatggggaggagattatgatgcagctcctttttgattgcggagtttttgccccgatcgacgctgaaaatggcatctactaccaacttagcggtatgattcggtcaagatgtagggagagagttgatcccggtttgctgatatttttataggtatcccactctcggatctcgagcctttgagcgacgcatctgcggaagccaacggctctactgccacagcacaagactcaatgcctaccgctggtcaaagacatcccaaagagaaagctgaatacaaacagagttccgagatgctccaaagcccaaacaacattgtgtttatgcggcgacgtatcctctatgggcgtgtcgagtctaaaaagggagtagcctctggactaggacagaaacgtacgtgcttcgccgtttgaataatggattttaggtttatgctaattcccattagatgttcttggccgcttctcaacgcttgattcgatggcgcaaacagtccatgttatgaagtacatatttccccgtcaattcggcctgctgaatgtatttacgctggactcggatcaacgcaagcagatgaatgactcgaatggtttcatgtctcgtgagagtgagatatctcttttggaagaacagaaacgaccacaggggcctcagactgggagtgaatcagcagatgcaggttgtggtggcgtgaaaagtgtcaaggtacctaagaggcttcgtggaattactatagagcttgtccggaagctccggaaccgcaacgcacaatgctcctacggagagttgctgcgatactattgtccaaccgaagtgagacacttttgttcacattggctaggattgtgtagctgacctttggcagcaaaccgaacccagactccttggcgcatctgtctccacaactgatgctaaaaaaagcgagcctatctcctctctcgagtcaaattttgtaacacaggtgaactacccgtcgccaagtgatagttcgcagacctcatgtgatggcgcgagatcagagccgcacatagctgtcgacacatcttgtggaaacgatgccgagaaaccggtgatccgaaagactcaagtcagtctaactgatcatgcgactccgccatcttctgtctcggcattttgtcgagcggtaatccagaaattgatcccacggcagttttggggggttggtccagatggtatttcgaacttcaagctggttctcaggcatgttgaccgatttatcaaattgcgccgattcgaaagtctaagtctgcacgaagtctgcaaaggtgtcaaggttggtcattgcttgcactgaactgatcgtctgagacaaagccgtactgatccgcacgctagataacaagcattccttggctggcgccaccccaggtccagactagtctgccatctgagacaagatcgaagatcgccctgtctgacttgcacaaacgcaccgagctactccatgaattcatgttttggattttcgattcactccttattcctctcattcgttcgcatttctatgtcaccgagtctcaagtgcaccgaaaccgccttttctatttccgccatgatgtgtggcagcagttgacccagcaacctttcggtgacttgaaggcaatgatgttcgaggagcttgagtcagatcaagcccaacgtgtgctggcgcggcggtcctttggtttcggtgctctccgtttgcttcccaagtctacaggcatccggcccatcttgaaccttcgcaaacgagatttgaagacacggtcatgggggaaacgggaaacgtaccttggcatcagcatcaattcaagtattacgcctatttataacatgttgacctatgagcgtgagcaagctcctgccaaattgggctcgtcgatactctccgttgcagatatgcaccgccgattgaaggcgtacaaagaacaattgtcccaacgactgccctcggcttctagaccttggcaatccaagctcccaccgatgtactttgtcaaggttgatatcaaagcttgttttgatactatcccccagaaaaagctgcttaatcttatcgaagagctggtctctgaagagagctactgcatcgcaaagcacaccgagatccacccgcccacttctactgcgaaacaaggaaagcccatacgaaggtttctgagtcgcgctactcctgctatgaaaccgcaacacctaccagactacgtcaatagcgaaagcacgacccgaaaggccaacaccgtttttgttgagtgtggtcaaaaagaaaatgatgctgatagtcttctggaacttctcagtgaacatgtccagaacaacctcgtgaagataggcaagagatttttccgccaacgcaacggcattcctcaaggctccgtgctatcaagcctcctttgcaatttcttctatgccgagcttgagcgaaaggtactgaatttcatcaaacccgaggattctcttctcctgcgactcgtggacgatttccttctggtcaccccggatgtagctgtggcaatgcagtttctggaagtaatgatcaggggccaaccatcgtacggtgtacaggtcaatccagcgaaaagcatggccaatttcagcgcagcggttgacgggattttacttcccagattagagggaagcacattatttccgtattgcggtagtctcatcgacactcacacgctggaatttcaccgcgatcaagaccgcatccttcagggcggcgagtcggctgctgctactctctccgatgccttgaccgttgaagccgcccgcctacccggccgtacctttcaccgcaaaatgctctcctcattccgtctgcagctatattccatgtacattgatgacggacacaattcgcgcgcagttgtgctagccaacctctactgcagcttcatcactgctgccatgaggatgtaccgctatatgaagtcgcttcggggtcgtgcgcatcccggccctgccatcataacacagactatccgcgatctgattcggcagacgaaccgttatatccaggcccggcgtgctggtaattcggagtccccattctcgtgtttcgttcagcgatcccatttacagtatctggcttctgcggcatttcggtttgttttgaagcgcaagcaaacacggtatgcggtggtgctgcgctggctagactcgctgagtaaagattctcgacccacatcagattccgaggcttcgagaatagcacaggtagtgaagaagggaaatgccatgttcgaggaatggcggttctagaatagttagtgccggaatgtctgcaaatcaagtaataatcggtgtaattgtacgatcaattgccctcgactagtataattgcacaattgtacgctcatctccctggggccaattaaatagtgcatacagtgccacaatctattcagcccgccagcatcattgggcacaaatccggctaaatccgattgaaacagatcagggttcaggggttcaaatcaagatatctttgatctgtgttcagggactttcaaggctatgtaggttatcccttcccatctgggtagagatcagtttccatctaccgtctaccacatacaacatagaatgtgttgaatactttatcgctacttcttaatagcccctttttaccctagtgaaacaaggtagcgccgaggtacccccctgttctcagccagaccgagtgcggcataacggcctgaggctctccgcttgcaatcttgagcatcacggtttcttcttctcactctcttttggattctcactgtcttcgtctctcgtttgaatcttttacttcttttctgcttacttccacccccacactcttttcctactgttttttgcttaccctctacaacccccctggccctcaatggtcaccccgtaatcttctctcctgatccctctttacacgactacacctgatctggatctcatcaggctgcggctgtgcctgcaattcatttctacattaattgacttctattgcggtattattctttcctgtctggaaacgcctgaccattctcattcaaaaacaccgatcttcacgtccgttgttgaccccttccggacatccgccaatttcctcccaccctgtgtactttttcaggtcgatcataattgcggggatcaatacatctgaataattacatgagatcatgaccaccgttttcccgacacccaattcgccccccgagctctccgggtccaaatcctccaaatcctcctcgtttcattcctcctcccacctggacggtgcggagagtatctttacggacatctcgaattttgaagacattggcttggaagatgataccgatttgacatacgccgatcctcgaggctcctacgcccgctctggggtgatggcacggtcgcccgccgccagaatatcaagcaaagtccctgcggcctcaactcgcgacttgaccgcggtccccaagcctcgcaagcgaagccccctgcccccgctccacagcggatcgaccaatgtgtcggcaggctccctcactgcgagaactgcagcccgaaaggatccaggcaacacattgcattcacccggtttgacaccatcgcaagctcgccggtcacggtctgtctcaccactacggccgacatccagtcgctccgcctcgagcaccagcctgggtctctctccgctatctgcacgagtgcccatccagaaacaaacttggcaaccgaatcgcaagtcggtcaaagatttggaggaagaataccatgactcggacgatgaactaccggacgatgcaagtctgtggaacatccctatttctccgcgcccagttcaggatcgggctccatcacggtctgccagtccaaatgggcgcagccccgggcggcgaccactgcctatccagcacgtcatacccgggagcgataagcaagcgtccgaaaatacggccagggcatcccgcatgaagcgtataccccgatcgagctccgcaggaccggagcgtggacaactgtcgccacgcaaccctcgtacctactcatataacagtttcctatctgacttgtcggaggaagctaagatcatcactgaagctctggagctgcatgctgatgatagagatcgcaagcgggaggagcatattcaaaccggtgctctgcggaagtccagcgaggactcgcatcgcgcatctcgtgatgctgtcgctttaccgcctctgcagaaatcaaatatcatgatcgatccgctgccaattagcaaggagaaagaaagggtcctcacgcggacacgccccagctggcttccgcctaaggaccagaaggaggagagaaaacatctaaagcagtatcagcaaatgatggcccagtctcgagaaattggtatgtgcaagacaagatccgtaaagtattgtcgggcttctaattggtatttcagagaaacgcaaagctgccagggaggcaaatgcacagtgtgaaaaggataacactcgagctacactgcagaacatctgggatgaatatgtgtatccgaattgggaccgcgctctccgcgagccccgaattcgcgagttatggtggcgcggaattccgcctcgcaaccggggcaccatatggaaacgagccattggcaacgaactagcattaaccgaggaaaccttcactaaagcgttgctccgagcaaaggatctccaaggcaagaaagatgtagaaagcgagaacagcaaacgactactggactgctttgaggcaatcgaaacggacgtgcccaaggccttcccagatatgaacctcttccaaggatgcggtccactacggcaaaccctcattgacgtcctgcaagcatactgcatgtaccgcagcgacgtaggatatatccacggtctgcacaccatcgccgccctcctcgtcttgcaattccccacccccgcttccgccttccttgccatggccaacgccctcaaccgtcctttgcccgtcgcgttcctcacttgggaccgcggcgccatggcccggtcctacactctagcctcagacaccttgcgctacaagttcacccgtctacacactcacctgaccgacaccctcaacctttccgaggcagagatttgggagcccatattccgctcgctgctgacaaacggccttgacctcgagcgcatctcccgcgtctgggactgctgggtcttcgagggtgatcgcattatgatccgctccgccgtcgccattctgggctgtctccaatcgcaactgttctccttccaccagagtgatgagcagtcccgtctagctgtgcgcgacgtgttgggctggggtccccgcagtcatggagccaacacccagaaacccaaagagcggcatagcgcccctgccgcagctggctttggcggtgggcagatcgagaaccccggcattgccgattattgggttcttggtgcttcgggcgacgaggatgacttcatgaatgccgtccgcgaggctggaaaggtgcgccagccaattcaataggcttggatataatacgtgccttcgcaatatgtgtgctctggtctgtcaggttctcacctttacttcagcctttcgttcttcttcgttttcctttttcctccttaccgtaccctcatcattccagatagcgcatagaatggcatcacagcctggccaacgtgtctgcttgccttcctatctactatctacccgtatacacatgtcactcgttgcacagccgttttgtctattctatgtatcttgaactgactgcatgagaaccactcgtttctttcttctcgttatattttttgtttttctttccacccaggaaccccaatattcttagctcattgattggtctttttcacttcttcctggttttcccactacttctccatcttgtatttttagccaccccgactttcatgccttgatgcatcgctgtttttcatcgttgatacgtacttgttagtggtattacaagcaattcaggtcttttgcagtcattccactatgttcactgagaaatatactgcattgcatagctggggagcatggttggtattggaggaactgactgataaatgtttcttaaggaacccccatcatgcagagccagcagcaagaacatatcccccatcaataacaacagtctgcccattaaaatactgattacaaaccgcaaaaagcacagcaccagccatatcctcatctctcccaggcctagcaacaggaactttcacccgatacttctcatccggaataaaactcttctgcttctcatcactctccccagtagtcatctcactaggaaaaggccccggcgcaatattattaaccctaacccgcagcttcgacgaactaacctgctgcgcaagcaacttggtcaaatgaatcgccgccgccttggaagcattatacgcaaaatggtgctgcgccatcttcacaatcccagacatggaagtcgtgttgagcacagtgctagaccaaccatctccaacctccgatccgcgctgcagcagcggcaggaacgccgttgtcatgaagaagatatgtgagacattctcgcggaagacctcgtcccactcgtcgaacgtcgcagccgggtcatcgaacagagtttcgcggagctcggatgcatctttgcgctcagtgtcttgcgtctggctggatattccggcgttgttcattaggattgagaggtagccttcgcgcgtggagatctccgagactagtcttctgatctcgtctttttcggttacgtcggcggcgagcgggattattttgccgcttatgttgttgccgtagagagaggctacgcgctcgagtttgtttgcggtgcgtccggttatgtatactttggcgccgttcacggctaaggcttgcgctgccattaggcctattcctgagccgccgcctgtgattagggccactgaggttgttagaacagggttgttgcactggggtttatatattgctcacctttgtctttcacgttgaacagcttttctagcttgaggctttggttgctttcactggctgctattttggtcttgtctgaaacgggggcttttctagtggaatttattccaaattgacgagatggtaggagagaacatagcttgggtcggattaatagaattgaccttcgaattgtttgttttttgctgaggactgttgtgtataatcgcggcatggctgtatatatagacgaggtaaaatgggggcaagtctttaggacaaagctcgaacctcttctagtcatacttcgcatgttgcggccatgaatcaattgtaggtcggcagttgcttcaatcaactatcttgtcagcatccaatccctacatacgaagtgtatcagaatgacgtcacttaaattatgtgaacagagcagaaagactcaaacggacagcaagcacagaaaaagcagagtaataaagaaaatgaaaccaactgccatgtaagaggtatcttactaattattgtagaagtgactttggttacatttttgagaatcctcatgctggaaatatatttactacctgagataacaggcaatatttagcatggcctgcgtggccttcatcagaatcctatcatctgtcatacattcacagcttggcctttacagccaacgcctcgctgaccggcgccacctcaaccatcatcttaccggtgttggcaccagcatagaggtcaatgagaccttgaggcgcagcctccaagccaccaggcacaatgtactctttgcgcttgagcttaccctcggacaaccaagtcccgagatccttgagtgcagccgggaattgcttcgcatgatcgaagacaatgaaacccttcagggtgatccgttgcgactgtcatcaattagccgaagtccccataaaagacacacccaaaaccaagagaactcacaatcacactcataaaactggccggaccctgcggcttagcagcattatactgactgatagcgccacagatagcaaagcgcgagccagtagccgctctcgccaagcaagcatcgaggatatcaccgccggtattatcaaagaagacatcaatatactcaggcgtagcgatcttaagctgctgcctccaatccgcatccttataattgaccgcagcatcgaaaccaagctccttgaccaagaaatcacacttctccttagtccccgccaaccccacaacacgcttggcgcccttgatgcgcgcaatctggccagccaccatgcccgtcgcgcccgcagcaccggacacaacaaccgtgtcccccttcttcacctgcgcgatctcgatcatgccaaagtatgccgtcagcccggtcatgccaagcacggacatcgcgtctgtgggccgtccgcctgccggaacgtgtatcttttccgcctctttcgcgccgaccacggcatactcctgccagccggagccggcgacgacccagtcgcccttgctatacttggacgtcagaccgctgccgacgatgaggacctgagcgatgctctggccgcgcatcacggcgccttgctcgacgggggcaatgtaggagcgcttggcggtgagccattggcgcatggccgggtcgagagagaggtagtgcacgcggacgagcagcttgtctgtaggtacatccttggggatggggatggtgtttagacggaaggtgccattgctgagagaggggtcgatggccggcgcgggaggcttgctgtagatgatttgtttgttggacattttgaaggatgcttgaggggattctgagtgaagagagaacgttcgttgtcgaaaaggaagaggagaaggtggaaatatctacaacatatgtaggatcggagacactccagattaggaaaactgctccttgggcctcggcttgtccccgggccaaagtcgaagtgttgaataatcagcttcttgcagatgcattatttttttactaggacacaataggatgtctatgtcatccatcccagaagggccctcaatgaccgcaacaagatatttatatatctcgaacgggtgatctagggtctgcactcatcctgacgtcattgacaaagaagtataaaagcaggaactgcaagactacgaggactgccacattcttctaataacaccgagacaagaaaaataaatacaatctccatattcaatcatgtcgcaaccaccctaccaaggctatgaacacgccgacccaatccatactgcccgcggcgaagtgggtggcggctcctcaactggcgcccaaggcatcccaacaggcctccacgacacacgatccgattacgatgaatccaagggctacaactctgccacaggagccagttactcgcgagcatcggcaggaggaccgacccagacccaccagcgaccgctctcaccgtcgcctcgcagcgatgaccggattgtaggggatgcgccgctcccgtacacggccagtacagcgcagcgcgcggaaatgggtgatcgttcggctcatgggactcatgggtctcatggacggtctggtgagaagttcggggaaagagtgaaggaagctttcgcgtcggttcatgtaagttggaatctttctgctcttgggaaatgagaaactgaatttgctatagggcgctggagaatcattgcgtggaaacttgaccaccgctgttgatcgggcttttgggtctgaggatggtgctgagcggaatcaagagattgcgaatagaggcgaggaggagtttcggactggtcagtttgtggggcacagggaccatagaacataatgtgtgatattgggaatgtaattaggaatctgggatattaaataagaacatagctattgaatatgtatgttatgccgtcgaaggttagggcccggatccaacgccgatcatacatcatggtagaaggagatcgatacgatatactccataaacctgtatccatcagccaagcatctcccctttgctaagacattcttaaaagttcttaaacgttcttagaattttttaacttttatacaacgtaagttccagagaccatccgaccgacccgagaaggctgtgctggtggaacccacctgtttccggttatgaacgcactcgacacaacattcttccttcaagtatattctacaaaggcattcctataatcctttactccgcattttgatcctggcccacatttgtgcatatagccaatgccaggtttggagacagttgcacactcgtacgacctcatgctttgaaactggttgataagctttctttctcggcatatatcgtcatggtctcaatttccgccgaccaaccggcgtcggaaagcgctgcgacggccgccccaacaaactcgcaccaacaggcattgtactcctcggagacggcatcctcgaatctgctcgggtcagactctccctcccaatattcgtccttctccagctccgatagcgacgaaccactgagcgacgaacccatcccgcactcgaccgaggtcaccgatgaagatgccgccggcgacgtggtgggggttagcatcggacgcgagcagagccgcatgaaggcccgagcaacccccgtggaagagaagaatcgcgtgctggaacaccagggatcatatttttcgactataccggatactataggcgaggatggtctgtttgcgtcggaactcacggccgagcctgaaacggtggagcccaaggttgaaaaagcaccagcaccaaaaccaaaacgagcaccaacatcggcaccaagaccagcaacgggcggggagaggcgcgaacataaacctaggccgtcatactcctccgcacagtatgatgagcctgaaccaggcaagcttgcgcatggccctcgcagcgatctatttgcctcggctcatgagaaaaccgggtcgaaagatgcagccgggagccagcggtctggttttgtcggggccttgttgaagaattcattacctcgccggccacgtgcctggtccaacgagttgaagaaattcctacctgacctgacctctttgaggaaacggccttctctcgcgttccgtgcccacaatggccaaaatcgaattcgcagccagacggtagcccctgcagctaaaaaacccttgagccagccgaaaagaacatcatcgctggtcctgcacccgcaacggtcacctcttgcaccgagcggttcaagcatcgaggatgaaggagaagccgctcagtcgatacctgagctgcgctcgccagatgggacctcggccgcgaaacattcctttacacggcggcctagttcagtcatgcccggtcgaccgccaagtttgcggaggtcctcgtcggatcaatcgctgtatctgcgtgcgtcttccacggcatcgtcccttgaacagcgaccattatacgagaatgtacattctcaggtaaatagccggttcaaggcaatcaaagatagtttccaagactcgagtaataggctgctcagcatgccgaatctccatctgcaggatatccgcaatgagtggggtcaattcctgccagagcttggaaacggtaacaacaacggtgctagtagtacttccaaagaggaacaatcaccgcgggctgaaagcccaccgccaactccgcggcataatcctaactcatcacatccagtcttggaagaagcaatggaagagctcacgggcgatgttgtgatcctaggaggttaccggggatcaattttgcggtctgctaagccaccccatcgtcaactttgggtgccgatgaaggttggtctgaatctgcgcaaagtggacttggaggtcggcctgaaaccggaggacgaggaacacatggaggagaccatcattccatccggggttctgtcccacgtgggcccggtggacgtctgtcgacgattgatgaagcggttacgcaggagcgagaatgcccagcgtggtgaaatgcgcgtccacgattatggatatgactggcgtctaagccccgagctgctctcgcgcaggctcatcgccttcctagagagcctgccatgcaatcaggagccttcgccgggggagccccgacgcggcgctatcgtcatcgcgcacagcctaggcggtctcatcacccgacacgcggtcaacgagcgaccagatctcttcgccggagtcgtatacgcaggcgtaccacagcactgcgtgaacatcctcggaccactccgcaatggcgacgacgtcctcatcagctcccgcgtgctaacagcccaagtaaacttcaccttccgcacaagtttcgccctcctccccgaagacgggcactgtttcatcgacaaacaaagcaaaaaggaattccgcatcgacttcttcaacgctcaaacctgggaagattaccgtctctctccttgcatggctccagctctccccgtacccccaacacccaccaccctcggcttcaaagacatccccataatcggcaagcgcttctccatgggtcctcgcgatgactccgacgaatccatcacccaagacccacaccatgtcacacaagacggacaccactctactgccgcagtagataaagacgtctccgcccgtaacaacaactcaccacacagcgcggccgcatacgccgcatacgcatctgaaaaagcccacgacccagccgacggcttagtcggaccaggcgcacacccgcgcagcagcaccaccacaacctccaaaatcgccacgacgtgcaccatcccgcacgccgccgcgagggagtacctagagcgcacgctggcagagacaaagcggttcaaggagaacctggcgttccggccgacactccactcggagaacaggtacccgcctgccgctgtgctgtacggcaagacgctgccgactgtgtacggagcgcgagtcgtgtcgcgtgagactatcaagcaggtcgatgcgtacgatgatcttgcgtttgcggctggtgatggtgtttgtcttgcttcggctgctatgttgccgcctggatataggattattaaagatggtctggtgaagagtgaacggggccatgttggattacttggtgatcttgagggcgttgggcagtgtctcaaggctattcatcggggtaggaaggagggagttggattgggggagaagaacatataagggttcgatgtgcgttcgtgttattttctggtgttggtctttttcttgatgatctttgatgataccattgccatatgtttgatgatttgggttatgttttttttttctgtttgtggatatggtatatttagatgtgactgtgtcatattgcattgagtctggcatattggcgtttctatagcaggggaggatgagactatttacatagaaatagaaagatagagaagaaagttggagcagagctcaatatacggatatggatagatcttgcacacacgctatgtaaccctatgccattctatgcatgtactttttgtcctcgtccaataccaattggaatagagaccgtctatcaagacaacagaagaaaaggaaacagtatcccggaattccatcacagtatatgaaagcatcacagtatatgaaagtaaaaaaaagatcatgaagaaggatgctataaaaacccaacaaaaagaaaacaaagtatcatcaagtctttaatccgtgcgcgagttggcaatgttcatgaccaagatatcactcgcgccgaccttaatcagctcatccattaccgtggcaatgtgcttcttctccaccatggagctgacagcaacccagccctcctcctcgagcgcggtgatagtaggcgcacgcttgccgggggtgatcttggacgcgattgccagctgctcacgcgggatgttgtattggcacaggacgaacttctgggcggtgatgacaccacgcagacgggagctgagtatagtgagcatttcggagttggtcttgcgggacttgaccagcacagcggtgctggagacaacagtgtcaattgccttcaggccagcggccttcatagtctcaccagactctgaacagatttgagtgttagcaacgggttccggttccctgttccgtattccacaggacagtatttcagtagactggcatatcacaacataccaacaagatcaacaataccatccgcaacgccgagagcgcaggcagcctcaacactaccgccaacatacttgatattcgtggagagtttctggccaacttcggcgccctcgaggttacggaagaaagattcagtgagggcagtgaagctggtcacgacgttgcggccaacgagatccttggcctctttgatatcgcccttctcaggcacctgcacttgcagcttgcaggcgccgaagcccaggtcgaggatctcctcgacgttggaggcctcgccggtgggcagggtggcatcgtgctcggcgacctggtcgcggccggtgattcccaaatcaacgcggccttcgccgacgaatgtcgggatatcggcagcgggcaggaagatcagcgcgatgggcaaattcttgaccagtgcgatatcgaggcgggtttcgcggcggaactggacgtcacagccggcgaggaggtcgagggttgcttgttgcagacgtccttctgtatagtggagtttgcgccgtcagtcttggtttctttgtgtttgtttcttgttcatgtgggtatcgctgctcgcatctatgagtcacgatttgggagagcacttgcttttgggcacggcgaagaggagacggccttcgaggctgtttagaatcgttatattagcagaaatccccatgcggtttgtaattgaaattgactcactggttgacgagatccatggtgatagagcggtgcggcgcggggctttctacagattttcggtggggggaataaggtgatcggggatcgattgacgaagtagtcaagtcaattgcaattcagagaccgtgaatataactcaaagacaagatagaacgattgatatagtccggaggagtcggggagagagaccggagcttcttgcggcagaaattggaggggcagattacaccggtgggttagttacgggaccgggggagtatgtaccgtgttcgctgcgcagtacgagcccacgtgatgggattctgtggtgtatggctatttgaagtgtctataggatatacatggtagagtctagaatgagtttctaatcgattgaataggataattggctgtacaggccgaagttgtctaaaagtggtgctgaacgatatcggagtccgaagaaaatatgttctgcctgaatatgcctgacccatcaggtgtcaattccatccgctgactcatccactgcctgacggctcaggtgtccagccctgagccctcgcgtaatttgcacgaacccacacaggccaaattccactttacactctcttacctacagtccaaccaattccaaccctcgagctcaacgccctctccttccctccaagatggattccagcaagcagcccgttaagctcgtcaaggtgacccgtgtcctcggccgcaccggtatgtgctttcccagcatttttgaagctccaaacccataattcgatattcgatattcgcggggtgcaaccattgcgccccggatcgcccgaaacaaaccgatgaaaaccagacacttggaggaatagcaatcgctaattttggtctatttaggatcccgtggtggtgtcacccaggtccgcgtcgagttcatggacgacacctcgcgttccatcatccgtaacgtcaagggcccaggtacgcgatattgatttctttgcatctgtcttttgggatcacaagaggagggagaaagaaacatggggtctatcgattcattctgtggaaagagccccatgttgaaatatggaattttgaagatcgacccaaaagacaagaaaaactttgccgaaccgcatcgctaacatattcctccgcaccagtccgcgttgacgacatcctctgcttgctcgagtccgagcgcgaggcccgccgtctccgttaaaattcaccaaaacgaaatttcgcttgcttcgtctattttgtctctcttcttctctcgcatatcccttacgaccggtttttcatgattactcttcggccaaaatcgagtcccccgcttttctttcttgccgtaccttcaacctcctatcctcagccctaaaccgccgcgctgcccaatcatccccacctgccgactctcaaggggccgtttctacgatttccgacgtttcgactggaggtgacagtttgggtggattgacttttggtttttttattttaaacgaaagtcccggaaggtcgattatggagaaacgatcgtgagagagaggagcagagagcgcaaaaaagataatagaaagcctttttttttattgatacgagaaaacgaaatcaggttcttgcgcgagggctggtttgtggacttgtggcacggtctggtctggtttcgatcttggtgttttactacatacacacgtccatttaggcgtgattgcatgggctcaatgcgacaaacgaggttgttatgttgtttcctctcttctcttcctcgtaccagcttcccccattactggtacttagaaaagaaaacgccgactcgaaccaggccccgatcgacaaaaagaacaatggaatccaaaaaaagtttgaaaatttccggttcagccttgtcgaggtcgaggtctgaaagcgttcgtagaatctgccagtgtagtcttgtgagtttctagtctaccaagtacattggtgtagacggtagctgtgctatgtcaaaccttcgtcccttctaaattggaaggtctgtatctgatgcgttttgtcgcctttttgtctttctagatataaaaccgagaagtgggaaggacataaagacacaaggccgcataagccaataatgtgatatttggcttttgctataaagcttcaacaaatgccatacttattctactatattctactaatgtatattactccatcacagacaatcgcaagattcgttctccgacatacatggtcctagtgagctacagctgctccgcactggccatgagcctactaagaaggccgtcatcagcagactctccgtcgagaccactctcatcaaggacccgaccaaccgcccccagaagcccagccaaccgcttccgccggatagattcctctagctcagcactcttctgacgggcgacgtcaataacatcggagggcaagttcgccagacgcgcaacattcaacccgtaactgcggtgcgcaactccctcagtaacctcgtagaggaacgtaatctccccatcgccgtccttgtccttgctacccgtctccgtgaaccgcatatggacattacggagagcatgatccgggaaggaatgcaccatgcgcgagagatgctggtaatgcgtgatgaaaagggtgagtgattggatcgagcgcaccatatagtcaagcaccgcctgcgcgatagcgacaccgtcgtgcgtcgatgtgccgcggcccagctcgtcgaggataaccaaggatcgaggcgttgcttgcttgaggatatctgctgtttcggagagttcgaccatgaaggttgattcgccagccagcatgttgtcgaaggcgcccatgcgcgtaaagaccgcatccaggagaccgagtcgggcggaagcggctgggacgtaggatccgatctggcccatgattgcgaccagtgctacctgtcgcacgtagctggatttaccgcccatgttcgggccggtgacgaggagggcgcgcgtgccgtcgtgcgatagatttgtgtcattgggtacgtatgtgtctgtgaggagttgctcgaccattgggtgtcggccctgctcgatgtggaggcctgcttcttctgtgtattctggcttgacatagcccggttgctgggctatgtctgcaagtgataataagcagtcgagtgtcgcgagggattgtatagaatcccggaaggactgatactgtgctgcgatatcagccaggagggttttgtatgcctggtcgcaggctgctgctagggcctccttgtactgatcacgctcgcggatgagctggatgacttctggcgtgtggaagcgagacactctttttgtgccgctgactttgacccacgatgcgggcacgcgcttgagtgccggggagttgttttcgatctcgatcaagtactcaatgccggatactgtggagtattcgactttgcctcttccaattgttgacgctgcctctttgcgatgttctaacaatccgtgttcagtgcttccaatttggagcttaagttcgccgatctcctctgtctcctccgcttcgcgaaagaaggtatatttgtcattggttcgtgcagcgtgcatgttgatcttatctagatacttgacgactgacgctcggatcgtaggcagagaggcgatggcctcacccactagcgatgattggaaccccgtctgggcaggtgatttgatatctgcaaactccattgcaatcatctgcatagcttgcaatacagtgagaagttcgggtcgctcacacttggctcaacattagtatagatgtggtcatcattgcagaagtgttacctacctttccatagtaaatccggattaaactcttctcaagatcactcttgactttgcgtagcaaccctcgtactctctccaccggaaccgctcgcgcaggatcaataagctcctcgacagcattcgtccgctcctcgaggcgcactttgtctagcaaaggtcttccaacccattgccgcagcatgcgttgtccgaatcgcgtttgcgtccgatctaaggtccagaataaactaccctttgtcgagtgatccgtctggttttggtaaatttctagactgaccagcgtgtttccgttcagaagcatatgcgaacgagccgagaagggctggaaatattttgtgaggtcaaacacatgttccagcccatactcggtcatatgttcgatcatagcagacagacagatagtcacctgctccgggagactaaggacgttttgaagcaacttcgcagcttgggtatcctcctcggtactggtagccttcatctttcctgcataaaactcagatacatggctatgtgcctcggcggcggaggttttcttcttctgggcccgttcgaggcgcacggcgtccccaaagacattcatcttgcttccagataaatgctgcacgagtttttcgctagctcgggacatctctccaacaatcaagatctcacagggggcgatgtgtaatagtcgtgtctcgatctcgctccgcatgaagccatcctcaaagtcatcgtagataacgtcacccgtagccggctggacagcgacaatccccacatgaactcgttcgtcgttccccgggcccttggcattggtctccgtcatacagagcatgtacccagtggcaggagaggcacctcccgctgccggtgcagggccctgcagaccttcggcgtcatcaatataggttcctttcgtgtagaggttggttaatttgcgaacaaatggcgcattgcgattatcacccgcagccttgagcgcagcggtctcgatctgtcgcaccacgccgaccttgtggccggctgtaacgagtcgcttcacatgcacgtgtagtcggtgcaccgggatactagccgatgcaaaccggccaatgtgtgcctcggatggatctgcggtaggtcccaacattagtatgctttcggcaataatagagaagatacttacgttcgtcgaatctgaacttcccggggatgcacacgattcccagctccttggccgcaatgcgcgcatcctccccaaagaagcggaacttgtatcccacttcaatgaccagcactgtgttcatgttctgacgcttgatctcaatgacctgtttctccatgggtgtgagcttgctcccggccttcttcgcaccctttcctttgaccgagggtggtggagcaggctcgtcctcttcctcggcctctgcagcttccacctctgcgctagctgcatcattcactgctaatctcccaatgccaacctggcaatctgacccaccgagcttccgcacgaattgctggtgtagtttctccttctctttcttccgctgtttccgctctgggtcttcctcctctaccgcagctgacggagcggcaggggagctctggaatttgaagatatcggtacgctggctgctgctgcttgcctgagaggtgtgctcgaagtgcacgcttgtcgctactcgtattggcgcctccgcgactgtgcccgtggttttggctcgctttggtgctggcaccacgatatcatcatcatcatcgtcatcatcagcttccggggtattgtcttgcttcggctcgggtttgtcggctggcgatgcttgttttttcttgggtgcattggccggggttgatgcgggtttctgggtgaagaagctagagatgctcgcttgctttcgtttcaatgatggagagggtgcagaggattgcgaagaatgaggtgccatcttgacgaaggataccaatgctcccaccgcaagtatgtggagtggcagtggagttacaggttgataataggagagcgacttcaatggaattcaatactgaggtatttaatctcagcttgatctcaaattaggtatgctccaaataatgtcccatgtgagttctccgcatctcggagctcgacgcgtacagaacgcgctagccctgggcatccacccgtggagttaattggttgctgactcatcacccccaatcctgcccagcccaggtgaattgctattttgtattttactgagaacaacttgagtcaattttgtgtgacaaagaaagcctatgtctatgaatgtctacaaggagtaggtgtatatgatttgaggtttgcatgagtgatgttgagtatagacatctacaactctgatagggagagagtgtgataaattggtggactatcaagttcatgtgcacaaagaaacaaatatcacaaactgcatgagcaaacaaaaccatcaatcaggcaaaacaggtaagcgacccagggtaagagacacggggcaagagacacaaggcaagagacacaaggcaagagacacaaggcaggagacaaaaggtaagacaaagcacagtcacaaagggaccatgaaggaaggaaccttcaagaaagaaacaaaccctcagagaattcttcactgggcaacagagggctatctctgtgaaaaggttccaaaaattggcttccagagagggccagaggccgtctccaggagcacgttgttcagctccacatacgtcaatggagaacctggggaagtacggtcggtgtccacagaggttgcagggggccgggccacaacatgcttcgtgcccttagatgagcggagctcgaacctagttttcggcctaacccaggccgcagcaaagatcgacgggagacagaacgagtgaagaagaaagaaagaagagagataaagggggggagggggtatttataccttcccaatggcttaaggcaacggggtaatggggttggtgacgatttttgaccaaaagggaaggcacctgaccaggtacctgactaggcagctccaggcagcggtctctggaccctttcatcacttcagactgtatagcatcaatggtagctcctttctctatcttcccattgctctttcaggcgacctgcacactgatattcactccagtatccgtataatcatagagaagcccactcctccagccataaagcccattatcatcaccctcagtctctcaagatctctcatccctctccccatctatggtccccgaagctgacacattaccatcaagcctgatcaacttacccaggtgatccacctatctcctcgtagcctctgagaaacagtaaggtaactcaacgcagggtttaagactcaactactagctgtcactggttttgccgagtgagcgatgttcacgttcacgttcatgttcacttaacatggctacatcccctagatccagaacaagaataatacatatagtctttacagaggaatatgtctataaggaaaggatggtattggtacagctttcacgtacaatagctgttgttagtctaatcgagtcaagttgcgaccactttctcctttcgtcttctgaccagggagtgtggtgacagacagtgcaagtgacgagataccagggcgacaaaatgcgattggtcgctgtagacgtgtttggttccagtcatcacaacaagcaatggagagaagctgaaggccagctccacttgttctcagcgagccgtcattcagaggcgaggaatagccggggcagctcgtatcagatgtgggtaaagtagatttaatttgctagacctggccataatgggccacattatcataccttcccagcactcgttcgtttcccgtattaaagtacaagaagagcaacatattaaaatgcgcctagatgatagagggtactgtatgtaggaaacacgagacgtagatgtactcgaagaacatatcaaacggatatctccaaaggtagagacgtcagaagtgatgaaacactggtagtggatcggttgttttcagctgctgcttgttgcagatgatttgaatgatctgtataccattgccctcgtcaaacagatgttgctggagcggcgatggagtaatcgatttgcagcaaggttataccatagcctgcttgctatttcaaagtcttcgcccgattccagggttacacgcttcgacgacatctaggttttcaaagactcgactatattgagcttgagtacagtagttatgcatgatcattatgaataatgagaacatggagttggcgagtgttcatcatagatgtgtcggtaagtttggaaaggcctgtctgtacatggaggtacagaaaaagtcgttcgggcagctctaggactttacgaagaggacacctaagaagaattgtcgagatctatacatgctacatggtacgaaaaacgtttttgatagacatttcatattgatactggctaatcataacattgtacagcatatcaaacagcccatcaaggatgggaaatacaaatggacacccatggataatcacaattgtttggaaatagcaattaggctaggtgtcaataagtccgggtcgtcgggcaagcgcaaatcatggtcaagctaccattgtcactgtctggggtttcggtcacatcttcggtcatttcggagcatttcatatcatcactgtatcgcagggttgaccagcagattgcatctgggatagatcaacagggtcatgagatcatgacatttagttcgcatcggtagtcaaatagtatccagaaaagaggtgcccgtcttctgggatggtttcttcggatggaactgtctggtcaattgaaagccagccattctgagcagtatgctcctcttcatactggctgtcatagaaagggtgcttcgagggggcttgcagggggttggagcgatacgcagccttgtcaaagccgtcgtattcaccaagatcaggaaggcatggtgggtcgaatccaaagtcatcaaggaaattgcgtttagcaaatggggagtgccaactgtgggggccaattcggccttgggggttcggaataggctcaatgttctctttgtcaacggaggtgtgtccaattctcaaggcatgactaccggtgttcgtctttccgttcaaaacaaggcgagtgggggtcaaggtgtcaaactgcgttctgaatcccgggtccgggtaggatgatttgctatcctcttcttccttttcctgatcaacaaaaatgccgaagccacctttgggccgcttgccaaaggtgttgacagtaagaccaaactcttcatcatcgccaacataagagtgagtacggtccgctgcacggcgcgagcgacggagaaagctttgttcttctttggcctccccttccatgttcttgcggcctttgtcggctttctgtctttttctgtccacagcacggggcacgttggggtcggctttggttagacgggtactcctggtacgagcgatgcctcgtctgggaactggagtctctcccttcagtgggctgtattcctccacgttacccgtgataatacgctccttcaacagacctccgtgtggggaaaagacctgttcggttggctccacgagcgaagaagtacgttccatcatcttcaagacagcaccatccttcttctggttgcgtcggcgacgcatctgcagcgtggcggaatcaaaaagatccatacctggccacagaactcccttgagtcttgcgatttcttcggcccgagtcttgtccatctcagggttgcccgatgcctgtatttgatcaccagaatcgataaaaggatcaggggtatctttgctagcaacccatgttctctccaaggggtccggtttgtatcggcgctgtatcggtgtcacgggcaaagccaatgatcgattttcatcagctggtccagaagcatcgaccggctgcaacccgtctgactttgtgccattcgaggatcgcatcgagcggaggatgggacccgttcgagatttcacattgctgtttgccataggcaaaggggttggcgtaatgggcgggatggttgtctccgcatgttgctgtttgtcattgtgagaatcagccaagcgagggtcgaggcaatcggaaactggggtagttgtgattgtagtagtactggagccctcagactcgacattgggtgctcggttacttgtatgtttagcggcggaagccaatgcgtcgtccggctttctttttttccgaacttctttgctggccatgcgagcagacagctgcttcgcgtagccattggcgtcaaaccaatcgtcgtattgcttgagaagctcgatcgcgttaggatcgtcggtgcgaagcttgagcttgaagtggctggccagatgagccttggaggcagcatgggtcaacaagtgagagacatcgctgaaatggggctgcccaggacagatgctacacatgaggatagtctcagccatgatccaaggccccgaaggaggcaacaactaaacagatagaacgagatgcaactggaaagggcaaaaacaaccaaactgtcgaagccaaagcaggtgtgaatgaagctggcgaaggagcgatggaagaggacgagagaccgttataagcacgtgcacaaggcggacggtcgtgcctgtcttcattatcaataagctattgatattcgaggaaggtgcgtattgttgggtcgcgggtaagtcacgggacgtcattgatacctcaaaacaactttcattcatcttgtcatcattatcttaaggtacacaatgggtatgtgccacgatgtcttaacagctcttgggccattgtaggggggtatgaagcggaataagtcaacgtggtcattattctccccccgcattgtatcccaaagtccatagggcaaagaacgatgggttattagattgcgggaggtttcaatatggatcgatcattgatccatctatcaatcaactgatgaactacccggcaaggcatttggtggtgattgacttaggcatgcaactgttgattcaagttagcaaatcatacgatagaatattagatactccatagctcactaaacagcatctatttcttcgaggccatcgaatttcaataaactcagccctgcaaggctgaaatgcgtatgatacacatccaccatatttcccggtcgatcagcaaagccaccagcatcggggtcctacgtaatggttagcaagagactacaagacacaataggcaattaaccaacctggcattgtaggacaaatgcggcaagcttatcgccatcgatccagtgcagacggtcgatcatggcaaggcttgatcctacccaccagctatagcaggcatctgcaagcttctctggtcgaccattgaaaccaccgctttcgatctggcgctcactgagccaagctccgagtcgatccttattcaccaagtctaagcgaccagcgatggccaacgcgccaatgcaggtgaatacctgaccagcgtgggactcggcaccggggcgaatgccataagctccatccaagttctcacaactttgaatgtgagcaacggctttggggacatcgactaggtccatcagacgcaacagtgacaaggcattgagggcaccatataagaatcgggtatctgtttcgccccactggtctcccatgaaggagccatctgcattttgtaggtttgcaatgactgtaagtaatagtttagtaaaccatccttgatatcagtaagtataagggaattctgtacaagacccaactttctccttgccgcctcgaccccgcttctcaagttcatccacagcatcaatggttacgaggatctgaacggcagagacagtatataacatatgggcatcatgacccggggcagcaccgaagcctccattctcattttggcatgaaaggacaaagtcgatggtctcatctcgaggtaaggtatccggatgacctaggatatgcagggctgtaagaccccaatatacaccgtttagtcgtaggtgctcggtcagccaatattccagctcatctttccgctgtgtcggtcaatcatcaccattcacccaacattttctttcaaggagcacgcacagtgtccaggttcttgatgtaagtaacatgctttgaggtgtgtagttcagagtctgcggggctgaccccggctctaccagggcccgatactagggccatgtcttggaatgatggaggtggctgattagaggggggacactgattggatagtggatgtgcaggttagtagatcgaaggatctgagagcttgtgaaattattaatgttcttagtagaaggcggtgaagttgtcagctagatcctttatgcacgacactgtgcacaaaacgtggcttgactttttgatggaagaagaagaaagcggttagtgggattcaaagattatttttggaatacttggcccgtgaccgctcacgtgaaagtcacgtgcgatgggtctcggttaataataactatcttatcgattgtataactactcctgacaagccctaaaaggttgttatgttgtacattctgccactatataatcaacactgattggtagaaacccaatcatatccactcagcatgccctgtgcaccacgctcaaagcactgtcatccccgaggcgctagtttgacatctccagccatgtttcagattggatggaacctcaaatgagaggaatgcgaaagcgagggcggtgtgtcagagaaccttgtgagccaggaataggtaataggaattgtatccaagggtgtcgaagtataactaatagaaattgtgcgggtatagttattgcatgcagattaatatcaaacacaatctattttttctctctagcgccccggagtattatcagcgttgtagctccgagtcttcccatgttatacaaagtttggtgaacaacgcagacggacctcgggaaacctctctgtttctaaaaatgtctctaaaacaggaattgagccatggcctgagtcttcatcggtaagcgggaatatgggttccaaggttcgacccgagacccaggctactatattaatttataaaagtggacgcggcacttcggacacggacacgtttgtgcattaatttagctcttacccctgatatacaacgggtttgtgaaatagatatagagtattaatggctgattaccttgaatgctatagatagactatttggccctgtatgtatatttgtacgcttctatagtaaccataaacaaccccaatcccaaccgtggatattccggcaaggaaaatcaggtactgttttattgcactgtaactggctcgccgatttaccaatgacaggccacatccactgtaacgtaaggcaacacattccgtggctctgacctacaaaagtggagagctctgatcattcgtgtactccggatggagtacagcccactatcgtatcgagtacattcgaactaagcaaatagaatctcatgccgtaaagctccagtgtcttgggtttggaggtgacgcgaatgtcaattgagtaattattattcatggaagttaagatatttatgatgcttatccaccgtcacattcggatcatcgcaaggtgttgggtctaagtgacgtttcgcccttcaggggggatcagataggaattaatattcccctctttttttcatagaattgtttgttgtatgttgtagatgttgcagtaagaagattatatggaaatgtttcaagtcaatataattgtgataattccaattttaattctcaaatcataactaattcttatactaatacctaataactatctctgatatgatctaataattatgacttctataatactagcgcggctggtctgatagtctctgctcggactagtgtaccgctaagtctattaggagaaacttggactttggcgacttttttttgtttacaattctgcaattcctcacctttcacatctccgacttcgacaactcctacataatacatacatcataccctgggatcactaattgtttcttttgactttgatccacacgactcctatctcgccccttccctgccgatcccttgaacttcgaagcgcccaaaaagagggggaaaacgtgaactcgcactgaacaagcccccgtctctcaaaacgtggagatatcggtgggaataatcgaacccataatatgaggcttttggtgagtgatcaacggacaatcaggacccgtccattgtttctaccatctccttcctagccttggctgtcaacaaagggtcgaggtgtggcttcttttaactcgggctttgcctgcatatgtcacctgcggtctcacctcttgtcttcttttctgactcttctgtttcctctcacttgtctctgatattgcgctgaccctataactggcgctccagatcccgcatcctcgatacttcgtttaatcccatactactttcgtcattacactggacgttcaggtagacaacattgcctatctcctagtactcctcagcttggaatccccttcgcgccccccactacacggccagacctcgatcattgatccccgtacaaatctctcagtcgcatgcctgacgtcggctttaaagctggccaagtacacatctagcagcccaaggatcaattcatctgaagctccaccaattcttgacccccaagccttcaccatcctggatcgggtctaattgccgcccaacatgtcgaagcgaatgtccacagtgcccaacctcgatctgagctcgtgcaagaccgactcgaagaaggataaagcctcatcgcctgtgacgccatgtgaccgtagttcagacggaccaagccccttaacaccgcgttcgcccaagtctacatcgagctctccactcttcaaaggcgcaacaattcgccctgtcgcgcaggactccgacaataaggcaaccagccctattctcccacatactcctggcatagagcctccgacacccggattcacagcgattcctcaacatttcccttctcccaaagactcaaggcatacgcgcgatgcctcgaaatcatttttcggcaacctcaaagcaccgaaaccatcccacaagtcacaacattcagatagctcggagaactccaccgaacatcccaagagtagaggcagctccagagaacggaagatgccaatggcttccaaacagtacgagtcaacgcctgaccttctaggggcacctgcccgtacgaatggaaccgaaaggactagtgagttcccctcgcgacttatgtgtagatcatatctaacaaaagattacagacggactctcaggccaaaatgattcgcagcaaacaggcgccaagaaagtcggtacggatttagagtccaccgcgccgaagaaaaacaaacaacgatttgcaaaccttttgacccgatctcgctctattcgagttgacgactcctccggacccagaccaccccgccggcgcccctctactggtcttgcgaaactcgaagagttcagtcaaggcgcaacgacgaccgcgaatccaccccgttgcgcgactgcgcgacccgaacgtggaggcttgcagcctcccgagcgccaagccgacaccacctctttgcgaaaagagcgtagccacggtaatatggtcgcgtcgggttcgttgagtcaagtttccggcgcctcggctgccattttcaacaatctgaagtcttcatcaagcggcactgcagatcgtattggcaaggccgggaaaggattctttagcaagatcacccgtagcggcagcacgaatgagagagatatgatcaccgatgattcgtacacgtgctcagtgatcaacctaccgctcattgagcaggcgagaaagactcgcattgcgaagaagctcgaagactgccgagacaagaccgagttctggatgcctgccttgccataccgctcaattgattatctaaacttcaagggttgcgaggaagagggcctttaccgtgttcccggtagtggcagggaggtcaagcactggcaaagaagatttgacacagaactcgacatcgatctcttcgaagcccctaatctatatgacattaatacggtcggatccctcttcaaagcttggcttcgtgagcttccagatgagcttttccccaagtcaacgcaaacgatgattgctatgaagtgcgaaggtgccaagaccgcaccacagctactcaaagacgagctctccaagttaccgccttaccattactatctcctcttcgccatcacctgccacctcaacctccttcactcgtacgtggaccagaacaaaatggactaccgcaacttgtgcatctgcttccagccctgcatgaagatcgacgcattctgtttccaattcttagtatgtgactggaagaactgctggcagggttgctggaccgagaaggaataccttgaacttgagaaaaagatggacgagcgcgacctgcgagtctcagaagagcaggaggccgccaaggcgaaggagcgggcctctggcagccacgaacgcgcagtctcgtcttccagcagcagcgctggggaagaagctcgtcagcctcttcgtcagcccttgcgccagcctgctcgtgaaacatcccgtgaaccatctcgtgagccaccccgcccagaaactgctcgccccgaaaccgctcgcccagcaatggctcgcccagaaattgttcgcccatccactgctcgcacccgaaaggccccgccgaagaatatcgagacgggacacacccggagcatctcccagcttcccgagcttggcccgccgctctctcctatcaaaatttaaatgcgaaagacgtctttcttggcatagatatgtctcagatgaaaacagcttcacgtcgttatctaccttttatgacctgcttccaatttggctggcccattttcctttctatctgcaggaccagataggattggacaagttgtttcagaatggaactaccttccaccaccacttttccctctccccatacttccgatacaatacctccatcgcctactaaccgtatgattgatggatatccccattcccatttggtctcatatagggatcagatgttctacaatattcccctttgatgtgtacatcttttgctctcttggcattttctctgaaattggcgaatggccggccgtttcgtttactcgtgctatactgcttgactcgcattgtttctccctccttttttgctgtctcttgtctatttggaagcgcagcaaatctcattccatgctttgcttgatattgcaacatctccagattcccctctgcggttgacattgatttccatcatcgctatttgctccatgcccgtttgcttcgttttgaaatggggtctacatttacattttgctcatttttgtttaaattatgtatctagcgtttcctttcgaggattgtacaatagagaaagcgggaaggctcactgttcggttcgagcaagatcatttctggtacaataatccccatagcctcacacagataatcaaaaatattgagctatctagtaaaggccatcgcaaatatcgacagatgcaataagagtgcttttggtgaatcacggtaggtccacaatatatgaagaatcccattcgactcccaaccccaacgccagagatgtaaaacgaatcaagacaggatagccagaggccataaaataagcgtgaaaaagaaaagaaaagagcacagaagaacccgatataaccagctcaatcaatgacaccctctcacttcgcacgagcagggttcgacctcttctcattcgaccgctgcttgcgctcattacgcttaatacggtccttgcgctcagtccgcgacataccgcgaatgttacttccctcggcattagcctcgccctctttcttccacttcttcatatcaacctcaacaagccattggttctcgtcgtccttgttcttgcccttgtaaccccagcgcggcacccactcgcccgaagcctcgtcgtattgcagcttcttgcggcgctccttgtcctggcccgcagcaccgggctgctggctgtacttgccgatgcccttcttgcgggcgaacagctcccatttcgtgggtgccttggggacgggcaccggcttgtggcgagggaggtggatgttcggcgctggcagggtgagaagaacgccgtcggagacggaggtcttgatctcgcaagttgtcaggagctggttgagcaggacttggacgccgtcgcgggctgttgctttcagcgagtcgttcagggtttggtctgcggggagctccaatgggttggggtcattgacgagcaggtggcccaggtcgaatgtgtagggggtgggctttgagacggtgattggcctgggcatggacgttagtttctatatttttcttcgttttctcttcttggctttttggtcgtgtatgcggttcggaaggagttcttacagtctctcggtcttggaaccagccgcaggcttgggcgcggagttcgccatctcgatatcagacatagcaatactgtagtattggtagactgttgatgttcaaaggttggtatcagcccgaagaaaaaaaaagttggttatcagatacagccgcttttgcttttctgccatgactaaggcttcccgaccgcctttccttctcagggcgggcggatttcgcatcaaattattgaccgaagtgttaactgctgttgttctctcaactcaattcccacccacttctccatctcagcaccggttgtcccctcactggctgcgccggtgtgactgacaacaatggcctcctcgtggtgctggaattgcctctcgaggcttcgcccgacaccgcgagcactcctcccgccgtccgcaacgccccggatttcgagcgcctccttccactccactgccgtgcactatgccctgccggccaagaagaagggagctagcttgacctccatgaagcacagacagtcaaccagcttgagaaggaagaagaagaaggtcactgaccgcggcggacgccccccagccgtgggtgagcgcaaggccttgcggaaacgcattgtcctgagcaaccccaatgcccttgagattgagggcatgctggagctgtccccggagactatggttgattcccgtctccgtggtaccgtcctgggattgcctgtgccgatgatcgatcaattgagagcagtgcaagccttcaagcccaaacagggctggtcgatattccgccggcctggaacagtccttcgacgtgataccattgagatgggtcgtttgtttgagcagatttctggggatgccgatgaggcccagaagggcaaggttgtcaagaaaattgttactggtatgaagggatctggcaagaccgtgcacttgctgcaggctatggccatgggcttcttgaagaagtgggctgttatcactattcccgatggtatgtgtatttgctgtgtatattcaattttgcagctgctgacctgtcactcttgcagcccgagatcttgtgtccggtgaattcgcctacgccgctatcgaagatagcaacccgctgaagtatgtccagcctactgcaacctcggctctgttgactcgcaccgtcgatgccaaccgggagctcttggctagcctgaaggtttcccagaaacacccgagtctgaagatgctgaagccttcctcgacccttgaagacctcgccaagcttggattcactgatcctgctgtcgcctggcgggtcttccaggccctttggactgagcttactgctactgcccccgccgcaggattggagaaggacttccagccccgtcctcctatgcttgttaccgtggatggtttggcccactggatgaccgagagtgcctaccgctccgctgaacacaagccgatccatgcgcacgacctcattttcgtccaccacttcctctcattgctgaaggagggtgaatccctgaagaatggcggtctcctcctttacgccacctcatgctcgaacaaccccaaccccgagggtctcaaaattgctctggaccgcttggccgcccgtcaggccggtatcagtgcctcctcgccggaattcccgcaactaccagcctacagcgatgccgatcctcgcgtcgtggacttcttccaccccgcagagaaggctgtcagcccactcgagttgcagacgctgggcggcctcactcgcgacgaggctcgtggtttcatggagtactttgcccgcagcggcctgctgcgtgagatcatcaatgaccagtgggtgagcgagaagtggagcttgtctggcggcggtatcatcggcgagctggagaagttcggccgtcgtgttcgcgccactgcttctgtctcgaaataagggttctatcttgcatttctttctcttgtcttatctccggctttcagatttgtgtttcacgtttacaactgtatatcggatcctggggttttccttgtgtgttctttgcccatgtattttacaaatctcacttggtccgcttgtgtctgtatgcatataatggatttgttttggaaaagttttatattcttcgtctcttgcacctacacgataacgaaagactaatccgaacaatagagactcgacgttgaatcgatcctctagttcacatccaatccagcaacacctcacgcatccaacttcttcggcctaggcgcacgtaccaaatcaggataatcaaacttagccgccacattcaggaaagacgaattagccgggtgcgcctccttacgcacatcatccccacgacacaaaaagttcatcgggaagccaacatcaaactcataagccccctcaatctccgccaaatcctcatccgacaaatcaaccccaagcccctcaatattacccaacaaatgctcaaccgtacgcccgcccacaatcggcaccacgtacggcgccttgcgcatcacatacgccaacgcaacgctggtcaaagcagttccacgccgacccgcaacagcctccaacaccttcgacaccgcaacatcctgctccgtcactggattctgtcgtccggggttcccgctgcgggcgatgtcttcccgctgcgcggttgttttgaatgcgccgccgccgagagaggcccagggtgcgaggcccatgccttcggacgcggccatggggataatgtctcgctcgaaatcgcgcgttgcggcgttccacttaccctggtagacggagaaggggcggaggccgtgatcgcgtgcgtctgtggttttggttttggttaatttggccttggacttggtttgggggagtagtggtaatagccagctgtaatgtaaaacttacattgattcgccttgctcacgatccatgcgggggtatcgctgatacccaagtatagaaccttcccggctaagaccagctggttgagggaggtcatgacctcctcgatggaagtgctgaaatcccaccagtggacgtagagctatatatacggaagttgttggttagtatagtctcggtgagtaagtaagccggaagaagcgagcagccacgtactagatcgatatactccgtccgcaatttcttcagactcgcttcgacagacagcttcagactcttggcattattgccgacgaagttcgcctggatctcagacttgttgtgcgtgcggtagggcgaggtatactttgtcgcgaggacgatttggtcgcgcacgccgcgggcttccatccactcaccgagccatttttcggattcttcggcttggtagttgttggctctttggattttgttagtgattagatcctttgggaatattcaagactgattgattggtaatatgcatacgtgtcgatgaagttacctccgttctcgtagtatgtatccaggatcttgaaagaggtctctttgttgcattcgccgaggcgttctttcctgttttagtgtaagttatattgtgtttggatatataaggtaggtattctacgtaccagccatcgccgaagttcatcgctcccaggcatagtgggcttactttgacaccggcagtgggcgctaacagccggtagcggccgagatgggactttggggtggcagctggggcaaacatgatggaaagggggattcagggtaatttagtatagaattaaggattgaagatcaagagactcaggagaatctctttcctttatagccgaagtcattatatgcggggttgaatgtgctcataatccggtggttgcatcgaggtgtagcatgatgcctttaattcctaagtccggccaaagcaggatttggggggaagggggggggggatttagggttaactccggttttatgcaataaatgctacttgtttactctctcgcatgttgaagtaatgaaataagccctcgttctatttatagctcagatcccgtagaacttcaactggacactatatacggggctatccctgtcccatctccagaatactcctcctcagtcgcctcctcagtcgcctcgtcagtctcggattccgggtcatcgagatcgtagaattggtcatatatatcatccacaatctctcggtactccatcaaatagtcatcaagttctgaatcgccctctccgagaacaccaccccaagtttcctgctttgggggaatcaccactggacctggtgtccaatcagcattcctattatcctgagtagcatcgccaacagacacagatctagccttccccttatcaatagaaggagcaacccccctgccttggcatcgagggcactcgcagttctttccaaaaagctgcacggcatgcatattgagatcgagcttttcgccgacgggatcagcgatcctataacgttgatagggaattctgatttcttccccggctttgatatccttgttcgcccagatcactacgcggttggggaccttgtcatcgtatccccacagtgcgttctcgaaagggcgacaggaatgattgaacatgcttaacccgggaaagaggtagaagtttccaaacgatggctccattgccgagatgtcttcttttttctctctcattctactctgtagagttgggtgcagtacaggtttgggaccatcacggtccttgaacgttgggtttgcacctcgtcgcgtatgttcccagggtacagcattgactagcaacttccgcagcaccgtctgaataacccaagtatcgaaggagaggtcgctgaatatgtccactccaaggttggagaggatatcaaaaggtacctggatattcccggccagagtaaaagggaaccagctgtccctccagggctcgttcgtatcggtacctgcctcgagaacgaggagttcgttgatctcatgcgcgagaagattagggtcctcttggcggcgatggagcgtaagttcaagcacactcttcaagagtagactcaaaatagtcccgtggcgttcattggtgtgggtgaaatactgcgatccgccccatgccactttatttggtcgcatggcatcgtgcaaccatccccaatcgagaccgcagaattctttgaaatggtatgtttcgcgcgcaatatccaagcaatgaggagccactccgtctgatattgcatcattgggaaaacagaacagcagaccgcccctagtagctctggagtaacctacatccacacatttacatattatgtcaaggcacgcgcaatcatccgggtgtttccgtccggaaagaggtgccgggttacgaatggagttccagttgtgctcgatatgccgaaccaagtcagggttaatcacggcttgacagttgtcacatcgtggggcatggagagggtcttcactttcatcgtcaagcagcctgttggggatgagatttccgcgaataactggttcctcgtagtgaatcatggttcctgctttgatgtttgcagtggcaaagacccctaaaccattgaaggaattgtcctctctgagggtgggctgcacctggcatgtccgttggaaagacttccccgcattgccactgaccgtgaagatatttgcattgagtgcattgataaaatatggtgcctcgcgtctcacgtctgcttggtcgtatggatatctatcggcgcctgaaatccatccgcggctccactcatgtccataaagggatggatgaagcgctgacggattatctcttctgtgctcgatccccgctctcacaggagcgctcactgtcatccttttcttaggaactgacatatcgcggtatgacaggggtctttggagttgacccttcatatggtcttcgaaatcatcccaacaattcagtgctgcgaggctgagactggtgatgctgtgaagggcgttcctcagagttgggatgaaatagttgataccgtttgccttcctcatttgcaggacctcccttgtcattgggactcccttgatcttcaattctaccatcaggtgctgctggatggcgtcccaaacacgggtatacattcctggccgcttgttcctttgggttgctgtcgtcaacacttcgcagagaagctctccgcgataggcgtctccaatggcgagatcgaaatagcccagcagataatgacaataagcacggctgttccagtaagttggattgtacgggctgagtttaattgctgctgtgtacatttcgagtgcagacatatctgttctcgtggcagggctcactacagctcttggctcacgatagataccccaatgactcaggttgctttgtctcaagaccccaaagcgctcatcacattcgtattcccatagacggcgttgtaggtctgtctttctcccatctgtgcttagaccccttaatgtcagttcatcggtgagtgtatctttcgtccaaagacccggatctctgacgttcagcccgtgtacaaaaaccctttgctccaatgcatctagcccctgcacgccgttgtaggtctcatctaagccctccgcggtgaaccgggctcgtgcatcatcacgcgagatcggcagaattggattgctcatcaggtgttcatagacattgtgagccaacgcatgcattaccgattcttcttcttcggttgctcgtgtataaggtcgattcgcatgtgccttccatgcacgtccgagggattcatctggctgctgccaaaatcgacgggcaagaaacgcgttgtcttcagtcaacgccggggctagcggcgctcgattgaaaagatccggccgctttggaaacgagggtggatggacaatgtctccacctgggtagacctcgtataatcgtttcctcggatccatcttgataccttggtggatccagaatagacaatcgttctagggatgggtatgtgaacgtggaaagagtatggcaggtctcaggatttcgatttccttgggccacatgagactgtgagtccaacacagacccatgtagttgccatgggagtatgaatgtcagattagtatcatacttgccgcagatcatggctgaaggaatccccatatcaaagggtcgggagacaaagaaagaggatggtttatttttggagagaacgccgattgagggtatatttcaacaaagaacagtgaaaaacacgtgttcttttggaataaacttgctttcgcaacaaaggaagataacaggtcccttgaataacttcatatcaccaatatgcctcggaggtacttgaaatccactctacttttagcgggaaaaccgccaagtatactccgtactagagatagcaaaacaaaggatgagatgcgactatgggattttctggaaggcttgtaatcctaggcctccaagcccttggatgcattccaatatatacatgtatatatgcccaacgggcagtgcgcggtcgtagttaagaagttgcactggaagtctcgtgggggtgacgaccccgtgctgaccccaaccccaacccaacacgaggatcaacacagccctggaggaatccttcggcaccttgaaaagaccggactcttgaaatattctcatgtcttgtctttctaaagtgctctgattcatcttaccatgcacggacagtctggtcctccctcacagccagaatggcgacttcctccgcgtctctcctcgccgtcgcaaccagggcctcctccgcctccacgtcccccggttgcttcatatgcaccagctgttcaatattcgccggctgctccatattcgccagccaactatggaccgatttcaaatccacagagactgccatcaccgagtgcgggtgcggatacaaccacgtggggagtgcggttcaaccagagctccggccccccattgccggtaagtcgaacgttagaaattcaaagtcgcataactaacagtcgcatagcctcgaccttccagtacaaatgagcaacggtacgcctatgcgcaatctcagtcgtatccatctgtcgcaactccttttcacggaatccaaccctctccccccccaccttcatatacaacactaccaccaccaccatctggtgttccacaaccgccgccaaaaatcccacaaggcactcaacatgtagcgggccaacaaggcgatcagacggggcgagctccactgctcgcccagggcgcaggagcggctgcgatgtctgggtcttacgaattccgccctgcgcctaccctcaatacaaatactacatctgtcagcgcatcggctctgggccctggaactccatcggattgggagcattttggcccaacccctgggcactttgatgatgcagcgtggttcccacctcgcaggacgccctctctgcatcacgaagggtctcaaccaccatcaaagcttccggacaatgttcccaacgtgtctgtggaagacgagtcggacattgttgctcgcccgagaacagatacaaatcaaacgcttccaagtattgtctctggggtcacacagtcgggacagggtggctcaaattcgcccgtcagtccatgcacaacacatggaataccaacaccgccccaactggtccgcacggataccaccagctctgccttgtctacaggtggacgttcagaaagcatcgatgatgtaataaatgcatgggttcgcccattatcgcctgcgcataaaccagttcaaccggaacatcaaggcctccccggcgcgttctaccagactagcccagtagagcgcccgcagtcaacgcaaaacagctcgtcatttttcgaccatttgcagtcgggctcgaatggttctgcgcaagtggtcgaaggacccagaagggtggctacgccagtaaaccaagaccccttcgaagatctggacccctgggccaaatcatcgttggaaagatatgtcgccatgctacgtaaggaggcagtggctgacttagatgaagaacgatataaaatcttcacggcttttatggccaaagagactaagctccggcagattctctataatattgagcctgagcctgaaagtaaatcgctgactctgcaagctcctaatcctgcccctcctcagccgctaccaacttccaataaaggcgaaccagctgttgagtcgggactgatacccgttgcgtcagaagaaattcctccctcggcggcaacggcaacagaggatgaagatctcgatgatgttggcagtgagtacagttcaggtggtcgtcctctgctcgttaagaaagcgcaaggaggctcgcaggctgttctgggcttacctactgcgccctcgggcgcagagtcgaatccctcaagacccttatcgatcatatcgatggatacgcagaagcaagtcttggaacccttgactacgaaccccccgcggcctatatacacgccattccagtatacagagggtccccagcgaggctcggacaacctcacctttgctcgcccagcatatcaaggctattctgacctgcggcaagcagctgtcagtgggcgagtcatgtcaaatgcaccagcaccagcacctacatctcgatcgaactcaaatactgcacttgcttcttccgcgcagaaagatcccgacgagacctttttgggtctaattcgtcacaagagcgtcgcttattctaaaccggctgagcgaaactctccaccggttccattgctgccagaaactcttcgtcaaggccggtcgaggggcctcgtggaagaattacgcaccatattacggacacccttggacaaacggtctgaaagctcatggcacatcatgactcgggaagaacttgaaaaatttcctgatgatttttcgtacattcgacggaccgttgatcaatgggaggaaacagcacgagccagacggcaaaatctggaacacgagcgcatggctcgtcaggatgaatctgagcggcacatcgatgatcttttcaatgggaaagagatcgggtatgcagacatcaataccttggaagaagaatttcggcaaagcgaagctcgggtccaattagaggaggaacgacacgaagtagacgatttcatgacacatgtgttcaatcctttagatgaaggcctaaaaaatgagatttcggcacttcgcaagtcctatgactctgctctcaatcaactcgaccttgatcaacagagcaaaggttcaccaagcgagcgaggcagcccatccgtgaccatgaaaattgtcaacgaccttcacaaaaagcttgagatccgattccagaaacgtcttgatatagcccttgactgtgagcaacgacggaagagggctgagcggcgaccacttgtggtcatgggtgatatatcgggtctacaaaaactagacggagagtttgaccaaatggaacggcgaaacattctggaagcgtgcaaggatcgtgatgatcgagccaaccgactcatggattccttcgacgacgcaatcttgcacgggctaggtttaaatcagagcctcctggacgaggttgcgtcgagaacagcccgactagataccgccaccttccgagcctccggtctaccgcgctctgaaattgggcagattctcaaatccgcggcaacctttgcggcgtcgctcggagctgattcggaggccatcatccgcagcgctggggttgcagacatgatcctaaacgacgccgactatggagtctccgtcgctgaagcgcgttatgccaactcagatccggagattttccatcggctgggggctgagaagataaaagaggatgagaagatccagggtgaaatgaattcaaagttgcagagcattcaagaggggcctgtgcagatcgaggccaccattcaacgtcttctccttggcttgcacaacgacccacaagccgctgcccctgtctctccagttcaaggcttctcctcaacgagcccatctggggaagtgcctctacatcctccaagtcttcgcccttcgactactagcccgggtccatctcccagtcccgcgcccgtgagccaaactacggatgaagacttggaacataaacagaggcttcgcagagcattagaggcagccaagcagcgcaacgctgccaggggccattgaccgagttggggggccgaatggaacatccacgacgcgacgaattgtgatgaatttccttgcgtttctagcataccattttatctgtttccttgtcctgtccttcaaatgttgtgtttctgctgtcacgcatttttggttgatacccactttatgcaactagttaaatgaagactgccccatgacattcattcgttctttctctaatcaatcaacctctgtatccaagattggttccgcttactccaatcctcgacctcgttcgcctattaggattagtagaattcgaaaacagattacccttgagacattcatgctttctttcaaatcgttgccagattgcgctaaacttcattcagtcaaggaaagtcctacattgttttcgtgatgtaactctacctagggaggggcgagtttacaaacattgaacatttgaagcgggggcttgggcatctttcaaaatattcactttcccgttatccaaaaactcaaccagttgacttcattgcttgctcaaattgaatccacatccagttcacaatgcaaccaatttctagagttgactgggacaaaggtgataatgatgggcttgtcactgtcggttcccataacctctacctgtccgtttcggggccagatcgcaagcctggagagcctatcgttgttctcatgcaaggccttggcagcacggtcgatgagtggattgcagtgcgaaagcttgtggttccatttgctcgttggttgaactatgatcgttcagggttgggtaggagtgaaggtcccaaccaaacaccaccaagcatatctgcagcatcagtcgcagcagatcttgatacacttctaagaaacgccagtattgagcctccgtttatcattgtcgcccactcatggggaggctacacttctcgcgagtttctggaactcaggcccaatgatgtcgtgggcatggtgttcgtggattgcaatactgaacgtttatttgacagtggtgcgtggggttgggacgttttcggtccagtcctcggtgaccaagactttgttgaaaccaccggtcttgcaacgtcccatgtcctatccgaggaggagtggaaagccgtcagagaccagcaggctaatccccgacatggacctaccgaggctgctgagttgcaggcggtgccgaataacagacgggcattggcccacaagaatcaacttgaaaagctacttctcaaggattatccggtcagtgtcatcattgcggatacacctaaagatttccagaaaatgtatgactttggagtggccgcaggcaatggaaccgaacaagaacgagctctgtttcgaaaatgtctcgatagatggcgcgagatgaatgaggactggcaaagagatcttttgaggctttctcgtctcagcagatctgttcgtctgcattgcagtcacaatgtgcagcttttacaaccacagagcatagttcaagaaatacagtggaccatagacagctgcagataaccctcaatctgctaataaagccttgagctcccggcttgcaaatcggaccctccaatgatgtgaccttggcttttgatccttaataaagaatttggagcctcgaaggaatggtgcgtggttgcgaccgggcaggtgcgtccgaatattgctggtggagggccattttcagcgtcaggaagtgccagtttcggccgtcccagcacaaatggtttctgtttagggggtaaattgtctattttgattattttgtctcgtgcaattagtttatagccaattcctgctgtgtgaaccccggttattgtctgctttcttctaactgtattcgagtttataatattctaagattgtatgtttgtcgaagtatacgccttgttcgggtcaacagcacaaaatttgacggagtctttttcccgatgttacacaaagaaccttttgcattgtattgttggctataaacatcagcaccatagcattatgtcttaaccacctccagagttcgcaggacgactttggtaattgaaccagtggttgacatcatacattctttcccccttcagaagacccgtaagattgcgatacagtttgacggccatgctgattttgctttctcctcccttcgcgccactgtggctgcgtcacgtacaggaggaattctgtcaagtgatccaacgtgcaggacaaaaaagaacggcgcacagacgatatctccgaaccctcagcgagccaaacccaagaaagttagccatcacctagggcttgtgtgaatctgaccatttctaggcgccgagggatggcgattggcagacgataaagccgagccagagagctaaacgccaatttctgccgatcaacgctgttgcgcagtcaaaagtggctgccgcagctcgaccggtccttgtctcaagctgccccgcattaacttgcagggatggaggattacctctaaacccaatacccaatatggcgggtcttgctgtgccgcacagttccctgcgtgccgcgctcggattcgctacgctttcgcactatacaatggatatcgtcaccatcccggacacgccgctacagcatagtctcctgcgcaggatttttggaccacttgacatgtcgacttcggttacagctcggtgatccactctttggtgatttgtctgcgcgatatgcaaggcagacccctgctatcaccaacacatctatgatcctggagacctcgaatagtgtctgaggactttgcggcgtatgggcttgcttatcctcggctgtgctcgccggccttgggagtcaagagcctcagaattctcatgggagtgtctccatgtcttccgagccaatgaccatcctcgtttgggatagtctgtcacattcgaccacgttgatggacagggatactgcgctttctttgtttttctctttgagggttgttgcgtggcacctggacaaagaaagcatcgggtgacctatccgagagccagcatcctaataattctccactatggaaaataccaaggtgcaatcctggccacagaaaaggaacttatctgaatggtggacccaagtgaggctgctctggagcttggaaacaatttccaattccttttcggtttctcgggcggcgatcgcagcttgtgcctttgtggtttgacctttggagtgtacgggaagcacgggaagtactattcccgttatctcgtgcctgcccttttctctgccctttttccctgcgtcggggtcaatatctatgccgccaacagcgtctacatgcaaatacgagatgcaagctttgcattggccaactgtagaatcagccactgtgcggctctcgggcatcaacagacaacataccatgatttttaactttcagtcgattccagtcacattcttttcagttgcatgcattgctctcggacaaaagagcgcagcatctttacgagacatggccctgtgttccccggagaccgccgtagccatgcccgaggtcagaatttgttttcgggtgccaaccactaaaccccagatcttaccacaagatcccccattagtggatgtctgtgcgctgtgcgatgatgctgatcctatgagacggtactaggattaaacggcgcggccttgtcgagacatcaccccttccttttcctcctgcggcacctcccattgaggctccaaatcccccccccctctttgcgatctgagcactcacctttcactaagcgctgttgggtgggaaaaaaaaaaacctggcaaatccaaagatcgatttccagccggaaaggtcggagatacaattattttgcgcagtcgaaatgaggacaaagacatgaaaagcattgtgtctcttcaatggcccctgattatttaaagcgggcgccagggaagccagttccatggttcagtgtacccgcttccgtccatgggtcgggagaactctgtgagtctaccaaagtccaccgtgtgggaaaatacgctgctcttcgaattccgtagcccctcttttgatttctggaggggacgcctgtcttctctcttttcttttcgccatgtccgctccaacgggccaattccacaggctgtccattggtcgaaatatgccagatacggccttgcctactagaacggcccgcacggggcggtcggactcttccagcgacgaaagtgatcatggagaggctgatagctcttcggagagctctagcgatggagaagaaggggacgagggtgagggcgaagaaagcagcggtgacgaaccgtccgaatcgaacagcgcctccgtcctcgcaacatccggcatcacctatgatctcagtcaactagattccgaggctgaagccagggcctttgtgggcttgaccggccatttcgatgttgtcaactgtcgctctacccccgccgggtatgacttccagctgtcggatcggccacaggtgcacatcggcgcggactcgtctacctgcacttgcgcggccttccaggatcgaccggacggcgcgtgccagcacatctttgtgagtgtgcctttttgggaaaagaagcttaaaacttgaagggcttgaactgccgatactaatccccatcccctgaacagtggctcgtcgatcaactgcacggctgcttcctccccatgcctcggtctacggaggtggcactgactccagatggacgtccggaccgtctccctcgcattgaggaccttttgcaggggaatctgatgtcggttgcaacgcagctcaaatggccgtaccaacgggacgaggaggacggcatgacgcggacagaaaaggtccgggacattttctctgcgttcagcaaccggactctcccagaagacactcgccgggacttgacagagacaaccgagcaagcacgaaccgcagagcagtgcgtggtgcaaggggatttcgaagcgaccatgttccgactcgcagtgcacgatgacggggttttcaacagcctatgcaaggcgatgcccgccggcgcgtgtgcggccatctacttcgacaaaatacaagagcagtcacgccgactactgagcgacttcgaccgatactgtgcaaccggtgagttgccggcgaaccccgtggtcccaggtttgggtgtagaggtcaacgacgttgtaacccatctccagcgttctgtgtcccgcattgcagccaacatcaccgcacgcgcccctcacggctctgaaagcgcggccgaagccctggtgtctcttctagagtcagtcgtggctcgcaataatgatcccctcgaaggcaatccccagggtcgccggtctttccacggcgaggacgaggaccagcgcaatctgtatcacttgctcatcgggtcggtcgaaacagactccgaaacagacgcgcggcactttgtccttcacgcgcttgatgccctgccgccggtggacctccaccagtgcgccaaccgcctgcgcgatatcctccgcaagatcgaagtcaaccgtgctccgaagccatatcttctccatctaggctcgttgatccgtaccggcgaatcagccgccaccactgcgatgggatctggacaaaagcgaccggcggctgggaatgggaattctgggggttcaaaacgaacccgctgattcgttctcaatctttttttatacatatgtttgttatattgttctgggaggccatcgtgttcattcattgcgataccccgctgcatcgtgtctttgcgtttcatcagcgacggatcgcttcaggtctattttgcttctcggtcatggcaatcatttacgtgtttgatgtctactatctaatatacgatcataagagctgctagcattgctatagccattggcatatacaatgaccctcacagacagcgcagacaaagtttccaatccaccagagctaccaatgtctataaccatgtaaaatgcaaaatgcaaaatgcaagtctcatgagaaagatgtcgtcattcccagtcagcacggccttgggaccccacgtctaccgtgagccgggtgtcaccgctgccacgggcagggattagttagcccgatttccaatgccgaaccatggtacaactctcggtagcgtgtgggtcgcccacactttgaaaaactctcaattttcttcttcgggcgcccagcaaaagcacgcgaatcagcgcaaagaccgaaataaaccttgcaaataccgagatcaagatcggaacgcatccatggaaacgtagatctgagatccagatccgttcgatcgcttcgcacatctacgcgtacattttgggggacggatattggatatcactacggggaccactcaatttcaatttcaatttcaattcaatctcaatgtgcccctcaatccaacgcccaatgcaccagttaatttcgataacactcaccaataacgtgtctcgaaaatgcggtgtcctctatgctcatcgtacgattaggcatacatgcccatgcgatatttggcggtgagggtttattaggcactcagaagtggatattacgagtgatatagtcgttgcagagcaaagcgactgattctaacttctaatgctgcgcaaagcccctcttactggcttattggcttcacagcaacccctcagctacaactcctctgcttttgtcataattcagccgaaacttgtccacgtgaccttgcccggtcacctgacgctgcattaaaacgctattatttcagccccattaggagaaaccatggacacgtgacacgtacgtaagatcttctgatttatacttgcttcgcttcgctccgcaatcatgccatgtcgatgttttcgacagggattgatgcccaggtgtgcgactaggaccggctaggaggtgtttagaccgtggatgccaatttttgggcccgtgcacacggtttgggggctagtgcttagggctgtgtttagctttggggtggacctacagggatgttgtataacttgacaatggtattgtatgccggatctacatatctgtatcacgatacaatgtcggccatgagaaggtgtaagatcgttttcttggccgatttatctttgagcaatcgggtttgggaaatattattgtagtaaatcactgagagtatgaaaaactccctgtagtatcaatcatttgcacaagactaatccgaggagtccctcttcaataatctgagtattaatcccttcaaagtatccaaatgatcttcgtggggatcttctgaagatctgaaaatctgaaaatctgcgtcccgttcaagtagaagccccaggcaagagggtcttactacgaggtgctgaatgagcgttcgcctcgaggtcagggtagtgaagactgttacaaatatagccgcgaaacgccgctagaataattgggatagatgatagacaatattttatgcggatggctttgatttttgaacgcatgtgtcttcgataggaagtcagctcttgagagtttgcatggctttgctaccttctcaaggttgcttgacttggccatgatattactcaagagtgattatgagacgcatgatgcatcgtctgaacaggtatgtacctgggtacatagtggaaggcgagaatggtgattggatagatgataaaaaaccaataagtatccgttggttaagtatcaaagtcagtggggcacgagaaaggatacccagtggcctagttggtaactctatcgaacagtacctgctctaaactaccctctaggtcatgtcgagaattacgcactcacggatctgggttcgtttgtccactttttttatactttttttttctctctccctacttctgttatatgataacagttttttgctcttcgtacgctttcaattttgcagatgacattcagcattctatcgaggcatccactgtatgtcaacaacatgaactccagtatcaaaatgcgcgtcattcatactattggccttggcctgggcgttctttgaaatctccagtgtagatcattgcatagtcgccagatggtcatgtatatcaacgaagttgttccgatccatcgtctcttcgtctccaattaactattctttctctatgtcttgatattcttctttaaaaggtccatttgtcccaaatttaactggccagactgccattttgcttataaagcacactttttctctttcatcaacaaggccggctggcccaatggcaaggcgcttgactacgaatcaagagattgcaggttcgatccctgcgtcggtcacttctttttttgcccatttctttttattcgtctctcgttttgacctttcttttccaatttttgatgtgcaaaatattatagagtgaatataaattgttctcggcatttttggcgaaaaaaactcactcaattggtgcaaaatatcaattatcgaatatagcggttagccgttatatatcctagccataacaccagtcaacaaaccaactttactaggaacgaacgaaaggttcctataacaagatgaaaccagattcatatatacagcattcatccagaaagatccaacacaacccgaccctgcatcttcccctcctcgagctccttgaacaccccagtcaaagcatccatcttctctatccgataatgcaccttaatgacacccctggcagcaaactccatagtctcaatcgcctccttccgactcccaaccgccgacccggtaatagtccactgctggccaaccatcgcagacgggaacgccgtcgcaatagcctgcgggtcatgttccggaatgcccacgcagaccagcgtaccattgaaacgcaacaacgacagcgcctgcgcatacgccgcattcacagccgtacagacaatcgccgcgtgagcgcccagtccatctgccagcgaatgaacgtgcttcgtcagcgcggcgccactatcgtccctcgggaactgcgtgatatccacgaaatgctctgccccagattccttgacgagtccctctttgctgccgtagtcgatgctgattacgcgcaggcccattccccggctcgcgagctgtactgcaaggtggcctagcccgccgccggcaccggagattatcacccactgtccgggccgcgcgttgctacgtttcagtgcggagtatactgttacgccggcgcagagcagtggtgctgccgaggcggagtcgagaccgtctgggataggggttacgtagtttgcgggtcctaatgtgtattgctggaatgttcctggggtatagtagccggagactttctagttgaagcacagtccgtcggagctggcttggcagggttctggatggggggttgttaagttcgaggtgtatatttgggttgttgaggaaagtaaatggtatcgtacggcagtgcccacatgcactggaaacccatttgacaccgactcgatcgccgatctttaggtttgaggattcggtgtctgcaccgagtttgactaccttgccgacaccttcgtggccgcccacttggcctggctgagttgggtgtgggaacgcgcttcactgggtggtattagtaagtacccgagacagagagggtaggatagttatgtgcatactctgttggtcatgatactaaagtccgagtggcacacgccggaatgtgttctatcatcgtcagtactattctagcattgaaatcaagataagaagtacaaattaatgagaacctcgcccgtaccaggctctgggacatctagttccacaatctttgtcgaaaccgtcccaggctggtcgtaaataatggccttctgattggtggggatttcaggagcggccattatgactgattaccggtgacaggttgaaaggaggccagatgttgaactacgaagttaatctcaactgaatttcaagcgtcggagaggtgtctatagagaagatgcttaattgaatgctggaaatggtcttgaatagattgtctcattttgtcaagtagaaaaagaggagaatagcgaagagggtcctgtgatcgaatagcggggtttgggacttttggatcgacggatcaaaggcacacgctggctgtgcatgccgaggaagctggctatccaggcagtcattatgatagtgtttctttgtgctgggatgaagtgaggggtgaaacgcggagccatggaaggacctcggttccataagctgcatacatctgcatccattgctggaatgaacaataaagtcagaggagtggattgtagagagatccaagacgtggaatgttgggagtttatatacattggagaatccccaaggtcctcatccatttgataacattagaaacgtgctatacctcttttcggtttatcttggagaagtgattgcactcaaattatgaacaatacatgtggactaagtatttttattggctaaaatggtgatgatatttttataaagtgcttggcctgaaagtagcagcaaccatcctttgtatctattctgaacctgaaaactgtacatcaacgccccatatttaatggcgcctcgcaaagcctatttaccctgccttgtgtaatttatattgtggacccagtacacattggtaagagggatcaaagaggcttggattgctaactcgtgtttgtacatcaggcagaagggccgaaactgttatattaaagcacagaccacataaaaagggttcccatacaaagattgtttatcggggcgtatccttgaccctggattaggtattcgctggctacagcatcggtgccagcgagcgggacgttccacgtatacgtgtaaccactctgagattgaggcgcgacaccgatagaggaccacgaccactccgcattagatttggatttagaattccaagtgccagtatattcgtaaaacccagagtaaaaggcattgccttcgacaaggtagttgacgatctggtgcaactgggtacctagactgtccaagcctggcttgtccatcggccacccgtggacgggtgttgggttaaatgagtattgatcatcttggttgatgccgatgaatagccgcacaaatgcgtatggtaccaggacgtcggctttgtagacaacggtgtcaccattctgtgtatagctaacattggtgattggaccgtcggacggtaggcttttcgtgctcgccgagatcgtccgggaggagccaccgccactacctgaagctaagaccgtccgtacctcgaaggagataccagaggatccagggtcgagcatgccgaccgtagctcgggtcaatgaggctggcagttccagtaccagtgcaccgtccttatatactgcgtagccaagagcattcgaaactgatgaccaggtgagtgtgacggagctatagtccgaagaggagatggcgacatcacttggaagaccagcaacgtgggagctagtagctttagctgggttaccaatgagaggcgtgccacctggtacggcgccgatgagtgcttgcatataagcctcgctgggtagattgtcgtaagggttgggttggtcatcatcggtaatttccagtaagcctgcatggcggctcgaggcaagagcagcaacagtcgcaacctgatcctgtggaactttgtagatgatgtgccatagctttcggggatcctttggcgtccaatcattaggcacatacgagcttatataagtctcgtagctgctctcgaacgtcaacagcgtatccatagtgttttcaaaacattgagctattggagagcccgggttgagtactgtgaatgcgccggggtatttgttcttcgtatatttgttgatgtatgcgtacagatcggcgtagatattgttgggaccgcattctggccagccttcatcaaaaaagataccgccgagactggtcccatagagctcgaaccacttgtcgacatcttgttcgatttgcgaagcccagtctgcgaggtctttcgagcctagtcgagtggtaaattgttgttgactcacgccaagatagccagtccgaacataaccaaggatctttttgccttgactcgcagcttgatcaatcaccgatttccaggcttcatcgaccacataatctggaccgttcaaaacattggcaaccaatatgctgagtttctgagtgtcgtatgcgaagattcgttcccacgaagccgggtctcctagggggttgatatacgacgccaccgcgatttgttctaaacgcacgtacaccgtattagttttgttttatttgaagtagcaagccaattgtacgtacggcggtttggagcattcgagtcgtttgatccactcgagccggagtaagaacatgagttgtaggagaacttctccggtatttccggaagcccattgtcctgctcgttcttattggccatttcataaatgaccagtgaggcaatgatctgatgaagtaagggctggggatggaacacccggccatacctatttatcaatcatttgtcagtgaaatattctagcccctttcgccaagctggatcaatttcttacccgtccggtaggaggtttgggatctctcttttttcagaatctgtggcacttggtgccaccttggagacggcaagagacttgattgaagcaacagtttcgtcggagatcatagattgatctgacaacttggcgttgggatctaaccaaagtgtaatctgcgcgagctcgttgacagaaccctcaaaggttccatcctcaacttcatccacgcttcgtttccagggattagagcccccgaggtcaaaagtattgagctcgtagaacatgagaccggttcttttctagtcgtcaatggtatactatacaagtggtaggcaagaactcaccttgtggtgctttcaaccgttgattcgtcgacgccatcttcacaaaagcggccattgaaatggcccacgtaggaatcgtagttgacaaacttgacttgggaacctgctctctctactgcagccgcctgtagaacaactgaagttagtcaaacctagaccagaaaaaggtaggggcatcaagaccaacaatctgtgcgttgacatcatcgacaagttcattcatgacttttcgatgatcggtggtgagtttccccgaatcctggctgacgattagtgccatgccaaacgtggatttatgatgctactcacccgagtccaaattgaccagctaacatcatcacacgcggatgttagatcttcggcgaagaatttggcgtaactttaatactgtcagcaatgcaaaacgaagcaaatgtcatgacacttacccagtgtagtagatcatcccactatcttcagttagccttgaaacctgaaatatggagcatttttactgactctgaagctagcttcaactttgccgccgtgatgacagtgtccaagctcttgccgaaggcatcgtcggcaatcatttcttgtgtacgggccaattgcccagcgcagcccagagccaaattttcccagttgaaggaatccttccaaaaaaaggtcgtctcattggcggccagacgtgccacatccacttcgtctggggtaaatgaagcccatcggaagatacaatggttcaggatattcgagagctcaacatcattgccacctaggtcatcactcctgttagtacagttcatgaggtagacttgggtgatatatttaccggctgatagcaatataacctgttggtccgcgttgagtgccggaatttgcttttcgaggacatcggatgtgactgccccagagcatgactcaaattgaaaagtgcgtgctgcttgatctcccagccgttcatcggtatggatgagataaggatacgcattatcataacgactgcatgcccagtcttttcaccgggaaagaatatctgtcagtaaatgtccttcaatcctaagccagggagagatcaataccaccgtaagatccaagccggccaccagcgccaattccagccgagtaggaatcgccgatggcggccatttttgtgatgaaggaaaggtctgccgggtcgaattcatcagtagtatctctcccaaacaaatgttcagtgttcaggcttgcattccctagtacttcccggtacccaagagggtttgcgagagtataacttcctagggtagcaatagccaccaggctatgccatgatggtttgagcatgtcgaacttagaaggccagaagccgatgagaaatggagagaagatgatgaaaatgggcagaaagacaatgagaaataggaaaaggaaacaggatattgcgaagactcaaagccactagaagcttcaagcgctgtaagagacttcttatacccatgctttttagtgtggtatcatacgccctcacggcttcgccacccaatctcaaagttattactagttctgtcctcactatcactatggcatcccaaatcggcacgcaaaccgcggcaaatatggttcaaatacttggcgcataaggcacgcggataggcccggataggcccgtttagtggatactcgcgtaaaagccgatatacataactaccaagcttcctaccctttttgttttctctctttcattattcgtgtacttcgtaatagtctatcatgttggtcttatccttctccttccatctttgatctttgatcttttcttgaacttgactctcacaggtatcaacatgtgccaggttagcccctgacggcgccataacgcgctagtgctagttagattagcattaaatgcctccgtcgctactccgtactgtatccacaaccttagcgctcagacttttccctagcgctccaactttgactttttcctggaagaagcggccccaatgtcgatacgcatgaagcaataagtccgtctcaagctcataaaagcattcttggcgcgggtttccgacatggtgccaatctccgaacgatcacaagtagtatcaatactggaccctgtagctccatcagctgatcgatgtgcttcctctatacggaactattcgttagtttgtccatattagcattttaaggcgtgatccatcggcttgtcgacattactttggatattggagctcttgctacaaatggtaatactctatcttgccgctggaacccttccggcaatcttccggcaatgcaacactcggaccctttcagtgggccaagaaagaacctccctcgccttcatttcaggactagcctcgcatgttagctcgaatccaggctgtgtttatcgaagaaaaattcatatggaccacagcacagaaaatgagatgtaaccatccgagacattctcatcggagtacagtctagtatagagtcgtatagcagtaatactagtgctattccgccactagtgtatagtgggactggtccttcaaacagaacaagagactagcaggcacagcacagtccaaagcggcgatgcttcgaagacttgctggacctcataatagtcagtcgcacactttattggaatcaataattccacctttcactcttggtagcttggatactagctattttaacttgataaggaatgtactatgtggcctaagtacggagtacagaaatgcaaatgtagcgttccgagacatttggctttggccctagcgtctagcatatacgccgcttcgtataataacatatagttattcgcgcaatttaaatcttgtcctagattgagaggtccgagtcttggctgatctaaaaggaagatattcggattttctaagcgacaaattgaagccattattttcactagttagactcatttgtaattgaaattagacctattgtacatcggccagacaaccctttataaggatagactagcctctgccgctcagagatatgtttctgggaacaacaggtacttcttggagtttcatcgttcactgtgcatgagtatatgaaaagcctagctttcaagtcaagaaatcatactccgagccgttgtccatttccattgtcgcggtgtaattaacgccttccttcaaccggagcttgacatggtggctaatgtatttgaaatttctagatccccgtcggtcacactcaaattgagtgcccgcttcaacgatgctcttcccactcgtccgaaagatcggtcttttggcctttggggccttggtcgtggtcaaccctgcacttggagcaaaacagcccaagctaggtagttacgacctgacggaagccaaaatgccgcttggcccgctcaaagttaccctagactatagcctcgcaacaacttggccgacgccgctggatctcaatgggccaaaggtcaagcgcaattggcaatttagcacccacatggtgttcgcgaattccgttgatgaaatatcggacgggcagctctggcaaatagcacgagatgcggttgatgagatgattgctgaccgaagccaatatctcatcgggcccatggcacaacctaacgccatgggaattctggcctggggcaatgagatcatacttgcgtcttctatgaagggagcaggttctttctcctatgactttcttggaggtgacaacccggtcggcagaagactagagatgtgccagatgctctgggggggagactggtcgactacccataagaacaatggtaattgcgcagaggaattcgcggccttcttataccacagacaaaacgaagttgaactgaaaggacaaaacccgagagttggcacctgggtcgcgggaaaagcttggaaacagatagatccatgtggaactggtgatgcggtaagtaattagtgttcttaggagcttatgcttcatgaagattaactgacaaatgtataggacatttgggggtgcaatcttttcgtccagggtgagggaatgagggtaatggatactgaaacagcaccggaaccttacacgttggccagccttgctggaggcccgacccgtcaggagcaaattcagtcatgcgggggtgatcctagagtattctttccgtagaaaaagattatagtgaatgggggtaggctcgaagggatattgttgacagaaggacttgtattagttatatatggggggcctgcctgatcttttcaggattccactgaccgccttatataccactttcgtgttacccaataatcgaaaagtaactatgatgtgatgtgcaatttggaaggtcaagaagtctcaaagtccacaatctaataagttgcaggcttttaaatacaaaaggggaatctcgcttctgtgttggggatcccaataatattgggaacgcacaacaacaaagtgagcagagattctatccaggacaagggaaaggaccggggtcaaacgctcaactgcctgatggcgtcaatcgccaagacgtttggaaagccaagcctggatttcaacacagacctgagtccctgactggttctgcttcagttattcgaacctgaattcccgactggtgacctatgtcttcgagaccctgtaacaacgcaaggtcccatatccccaattctttcgctaacagacgaaacccttggagacgaggagtgaacgtctcccattcttgtagccatggtcgaatagcttctaacaagtatgtacattcccattcccattcccattcttcttggagacatagtctgtccgtgacagtcagccattgaaggcttcttggaaggcattcctctaggcgagccacattaggcgtagactgagaaaatccaagcagaaaggcaattggaacttctagactttgcagcatatggagttcgctaaaagttttgaacgaccccctaaaccgaacctccgggtattcgggggctgattctgagagggatgtccctgccgtaatagtcaaatctgttaaagaattttgaacgtgggatagacccgcggctaattgatccaaatcaatgatatcggtgacatattcatcttgaagatctcgccgaaagtaccaatcccatttcaattttcgaaggtttggggtgattgatagtacttgggcgagaggcccctcacgtagcattgtcaaatcgagcgatacgagtttggatgcgtttggtagggttttcccgggccatttgaaagttggcgggttatcaaccaagacccttatccgttcaacagacggtaggtagaagagagggaggacatctgcagtatttctagcgtctgtatacttgcgtatgaagaagccaacgccgggaaatatagcctcgacatcttggagatatgaaaaggaattgagatgactatttttctcacagagggccgaacgaagcatcatacccataaggcgactctctcgggtgaagttttggctgagctggagagatttcagacatcggagctgtgataataagagtgacatgaacgcgtccactgttccggcgcgtaactcttggatccattcactggcaaatgaaacggagagattttcgatacagttcacgagcccatccaaaggaacttcaccaagtggaagtttcggactacttatcttgtagtcatagaagtattcatcgaagctatccccactaaggattagaacatgaatagaacttgcgagctcgggccttcgcacgatattatgcaaaaactgagcgatcggaggggtttgagattttgtccatgtcaattcgacgcgattgtagagaaatgactcagcaaccgcgcgcaagtccctatgcgtaagagatagtgcgtagagatcgctgcgcgataaagttgcaaatacgaggcgcaacagctctgtagggatggtgagaatagaggccgccatttgatgatttccgactgctatttcaaagagcccaagagtgatatctcgttgcctgttacaagtagggtgtagccctaagtactctagacccaatcaggaaacgacgacatacttctgtatgatcagctattcccccataaaagcggcggcagctaaaataggaaagccccaccctacgaagacccatagcgctcagggttcaaaactcctttcccacccggcagatagagtcacctatatcttatacttggggatattatgtccattgatctaagttgttaacactgattctcttatatgcacatgagaacgaatcaatcttatcgcaaaaaaaccacaaaatgccaagttcacgcataggatgcccagcctatttaaaattagtaaagcgtgatggtgaaattggcgcaaaggaaagagtatacataccgcaatacaacacagcaaggttcttctcatcacttgcctgctgaaccaattcattgacagtagccgtgacactgagggttttgctcagttttttcgccaccactgtcaacgcacggtcagcttcactaggttcattctcgttcccactctttgagacgagaccatcagctgccccaggcagagctgcaggcccatcactggcttgtttgtcctgcatttgcattttcttcacccgaaatggggagacagtccagctatacaacgggtcataccgtaatacatcgaggatcgtcattatgctgtacgattcttgccgaagtgcttcaagggtaaattcacaacaacgccggaaaacgccctcagtcttggtgataccgaatccatcgactacgtcgcgcgtcaaccggaacggtacaacttcaggaacaggaagcacacgtccttgttcgaacgctacaccgagatcaatgtgcaccacttccccggtcttctcatctagcagaatattatgtccgtgacgatcgccgagtccgagaacatgaccgaggatagagattgcagcggtgcttcgtgtgtaggctaaccgcttgctaaaccagtcgtctgggttgttgaacttctccatgaagaaatacttcaagactgggtggaagtgctcagtcacctgtcggtaggttctgatgcgttgctcaaaagatttagtctgtacatcggcaatgtgtttccggcaagagttgggtttcatgtccttcgggaagtatttctgatgtgctggcattaggtagtcgtgcagaggaatcgtgttcggaacgaactcaatgattcctgcgcttggtgtcaatggaagaaccttgtatgttcggatgcctaggctccgctggcgtgtaggttgatggtctttcaaaagactgctgacttgctcaaatacttgctccatgatggcatcttgccgcaggtcatcatttcctcccttgaactattgctttgttagtttaagaacgtcgacggacttcaaaaaaatagaaagcttactaattgcttgtagcacttgccgtcggatgcagaggcggacagaatttttggcgcgctaacgccggaagcaatcgtgaactctgagtagaaccttgtgattgtaggaacgtgactataatcgcaatctgcacggaggctgattttcattgtcggtggtggcagtttgtaagtgaccgcatcttgtccaaggcgttggccagtagtcaagcttcccagtgggaccttagcaccacttttgtatttgccgtctagtttatcgattgcaaatcgcacatagctgatgttcacattatgcacagcaatccaagtctgaccaatgtgactatcgttctttagacgatccacaagctgatttgcggcacggaaacgcgagtgagacgactgatctttccctcccttggacttgctgctagcgaaaatttggtacatgccatggaaaggatgctcaacacatatcctgtataccaattgagtgagtaatgtctggaaatcatcggagacatcgagtaggcgagatgatagctggttcatcaatggtgcaaattttcggctaggaactccgtccagataccgagagacagctgaatttgcagtctcattatctgatttatcaagccagagtgcacagaaacgtagagcatcattgttgtaagtatcgctttccctcaaactgagaaggtaattttcgaggcactgctgtaggaaagcctcccgacttcgcaacaaacgttgatattcgcggtcgtcaaggtcgaaccattgctttgccttggcccgataattcttcaagtattctctctccttgcctgtggcattcttcatcatgtcttccaggccaaggacttctttctccttgcggtcacgcagttgttccactctcttgaaatcttcgaatccatcagggtttagtagctgctgatcacaaaatgttgcaaagccgtgatagacacgtccagcttcttctccgtcggagtttcctttcaattccttgaccgcgggatataggtactcttgtagaattgagtcaggcttttccaagcgtgcctcggcaacgtggtgaccctaaacatgatattagcacttcggatagaaaggactttttggaaagactccctttaggagtctttcaaggactcttctaagaccaacttaccaaagtcactagaagttcagcccgactgagggggattgactgtttatgaaggtcattctggcccttcagttgctggagcatgcgaatggacgcggtcatctctccttgatcccacagaacgttggcaagatcgaattttgcagctccgtcaatgttcattcctaacgctgcgcacggttcggcaagcttcgaaaggctcattgcagatttgagcgatgcctgggagataccatgagttcttgtgatttccaaggattgtcgaatgactttcgcttctagaagtcgcgaatttccgagactcagatttgcccgtgatttgaggatgtcatttttcctgactgaggagaacaacgcctcatgccaagacaagatttctccaacttcatgatagctgctctagtcagtacatatcttgtaaatggttttgccaagggaaacacgcacctctcggttttcaaccagttgcttctcgccatgatattttgccactcttcctccacattctcggaaaacgcggagtgcaaagtgtcgctgatttcagttataattcccaacgcgcgcattgagcttcgcaactgaatagcagacccactggtcttgagaagagaacccagtgttgtcaacagaccactttcaattgagccattgacctcgagcagagaacccgaggtattgagactttggaatgtacggaatacagtcgcagatggggaagaatccgaaggcgatactggaatatcccatttttgaagattagttgcagcttgcaacatgctgtcaaaggcaacaggggcgtcgtttgcactgccggacgcagagagcatcgtattggcaatgccctggaggttggtagcatttaaagccttcaacacgccatatgattctgcattgtcagacatctgaatttcactgtcatattttgcactctggaataagagatttttgaacccggagctttcgtactctagccgttccatgacactgctcaaagatgagctctgctgaatgccatagaacaagtccggatcatcgatgtttttgaaaacatcatgcagaaaagcaggcggtggctcgtatctaacgacagatgagcgacgagatgtggaaacaacctgggatgtttgtatttccaggaaaagaagcgaagtcttatgcaaaccgcagcgatgtgcagctaaagatgcctctctgaagtcaatatcaagccatttgtcccgctggactatagttgattcatctggcacgggttggtttcgaaggtagagaatgcagtcgatcacaagctgagcgtgaggtaatgtttcctcgccaatctcacagagtacccgccgaaaagtagcagatatgtcttctcggaccttcccatttttgtctttatcatccttctctgactgcaaaacatcgtgaaccacgtatggcaacaactgcgctgctaagccaggagtcacgttgagaatttcgcgaagagagccaatgactgggtcttctggagcagcattagataagaacagggaaacattgcgagcccagtcagcaaccgacagcccggagacgctggttgctgcattttcacatctctcctgctccgagtttgaaagcaaaatggtgggacatgtgtatgggtcccagacgagggcaccaagcagagatatgggaatcaccctgctacaaccttcgtaatctggataatcatcgaccttgcttacgatcagccgcaaagtacgctcaatcaggccagcttcaaaatgcttttgcacgtccagcatttcgcaaagtaccatgagaattcgggccttagaatgacagaaaatatccttaggcaatggataagactcgttccattcaaatagtgagagatcctgttctcgcaggagcaattgatcgattttcccagtggcagcaaaggatcttccaatgacctgagcggcccaaagtcgatattgagggcctccattggagttttgaagtgtgtgccataaagatacaacatgggaagcgggatccacgccttcatttgacacccaattcccagtgtcggatgcctgctcgaattggggacataggagcgacagaataagatctgccagaggcttgctcaacagcgcagcccctttagagtcgaggtctttgagaattgcaaagaccaagtccttcccaacctgtccgaccgaagagtcctcacaagttgagaatttctcagcttgtgaaacaagccgatcaaatgatatttttggcacttcatggaaaagatgatcggaacggacctccttaataaactcaaccagccattggtggaatctttttgcatttgactgcactgttctgtactgactctcctgagtcgtgttctcaggtaacgacgaaaatattccgcggagagtaaccattgtcgagacagcgatacctgcagagaaatcgggtgcagataagaggtatcctttccctgcctcgagtagataccagaaaaccccaagagcatcctcagaacaatgaatgtcgctaaggaaaggccgcaaggagctgagtgtcatctctagaggataatcttgaagtatgacgggaccagccacacagattaagattcttattttgcggatcacagaacaagcatgaagcgaaccgagggcgggatgtatggattcaagcagcgagcggcagacaaaagacgcaagtgatggcgtccatattgattcaaattcaaatccagtgcgtctgcaaagaaattcaatttcatccaggagataccgtgtccgaaaggagggttgttgatttgctgggagtgcattttgagatgcactcttgttgattatttgtgtctgaatgtcgagcgcataaccgaagttttcacgctttgagaatgctcgttcgatctggtcatagtagtcgagagagttgaaaaaagtcgcaatgattagggggaattgactctcaatttgtgtcatgaactggtctgccccgagaagttttcgcagacggatttcaacccccttgggctggctaccttgccccggaggagtactgatatctcgtgcaatgctgtatgcctcagctttgtagaaagaggtcaccaagagctcgagatgtggaatctggaggtattttgcaagctcaattgtttcctgttccttggcacgcatcatcatttgcccaacgatttcatctttgacgtccatcaacatatcctgaaggctgtcataccgaaatatagtaaatggcatagacatgatactctgtgtctctgtccatgtgtagagtatttgcgacgagaaaagccgaaaaagttgtttcgcgtcttgcagaccgagggtctgcgaaacggagaccatacatctctcggcataccacagtgacattggaacttgagctggggtttcaaatagatggtagatacttctccgcagcaaagtatgccatctagaagccaaccgagaaagcacaaaaaggcggactgcaattccttcgatccattcagggtctcgtggcaagctctccaatacatcatcaaagatggcatcgtggtctttgagaaggaaccgctcaaataaagcagggataaatttcgcaacgctgaatttgacttgaacatcaccttctcgaaggattgtgaataaacttgttcgtggcgacggaagagactgctcattgccatatgaggggcatgtaccaatcaccccctggatgagctcggctaaggcgatgtagacctttggtgtagctcttttccgggccagaagcacttccataaaccaattgtacaagtccatagccgattctttcaaggtatcgtcaaggcctttcgtccaggagccgacaaagctggtcatcatgcggatgcaaacgcaatgtgaagcctcacaccgctccatttcataagactgtagacaattttcacctaaattttccaggatgcagagcagttttgagggctccgattccgagcagagtttgaagatttcaggtaagatagcttgggccgccaagatatcggcttcatctaagcctgccaggtattcaacgacagaggacgagtcaaaatctgcttgggttctaaggaataccgagagttggatggttagacagcgttggtatgtgacggggtcaaggaagatagacagagaatttcggttcaaggtaagaatagtgtcatcaatggctattgggggttcggccatgaatcggtcatccacatccataaaatcttcggctgcagatggactttttgagttctggcggaaatactcgagcgtttttgcaagtggagtgacaagttctttaagactagtctggatggcagcgggggtgtcagaactcgttaaaggatcgaggagcggtgacaacaagtctaagcaagattgcatgaaagcggattcgtgtgtatgagctgccagaaaatcgcatatagcgttccacagactccgacagttctggtgcagatcttgtgatcgaggttgagattgcaatgatggaggaagacatgccatgaagagggaaaccacaacacaaaaggacgccagaatctggaagttatccggagtgatatgtgatttttcttcattcatagcgtgccacgtttgtaaaaacgagtcagatctcactcgaaacagatctaagatcgctatatcatcagggtcttgcctagagaattgctccaaggaccatgtttcctgcagactccaggggtttgctggagcaaaattcgtatcaaaaatgtaccccaacaatttgcggttctcgtggaaaaagagccaagtgcgagctatatgccccgttggtcctgtgacttgataacgaggaatggcgaaggatcgattagtgcacgacagaaaaaggtccagtaagtccaaaggacgagcatacgcagcaactcgagctgtctggattcgatcagttaccgaacctgcaaagtgactgtcagccagaaaccgcgaaaggaaaattttagggcctcgtaccggcccaaacttctcttagccagctacatatctgtatcgaggcctgctgggccgacctgggatcaagctgtgtcctcattcgtgcaattgaggcccatagccttaaagacgtgtctgagatagcagatggtccattgacagatgtcaaaagtgaccgcgttgtctccatagctactgagtaatccaataagtctgactgcaaaatcatactcactaggttacacgcagctcgagatgtcaccggagatgagaatgcacgcgtagtaaattcgactactcgtggccagtggaccctaattctaggtgatttggcagtagccccgttcgcaatactattgtcatagtcaatttagggcctttcttcctatcctttctagatgcatttccgaatttacgtaccttgtcagagcaaccattgtccaggatgatacagcaccattaccgccagagatgttcaggacaagctgcttgaagaagggctccttcgtctcgatgtcaacctcagattcgaggaatgggatgagttgcaatgcacatattctttttgtgcctgtggctgagaccgaatctcgaaatacgtcctggatctcagaactgaagcgctgccttttgcttgaggcttcgcgtgctgacccagacttgactcgggtgtgaatacactccgagagctttaatagctctgcaatcaaccagaggactgtccagttatgctctgatctagcagttccgaagcaaggtccatatactggtctggtccggcatgcttcattgtgataaagtgtcgtttcatcaatttgcatgatctccttttctgcccgtctcacgtattcggaatggagtgtactggctaatccctcgatatcatgtgccagagattccgacgggtcttttcgagcagtgtccacgaagacgatcattgacagcatcaaagtggcaagtaactcttctttgagaatctgtaccttagtggcccataggcgtcgaattactggaaccaggcctgacaggaccaaacggacaagttcggattgatcaaacatgacttttgtaacgactgcatttatgctattgaacgcgagctggtgtgtattcccagccacagatgactcaacaaactccgaaagtccgtgaagtatgctttgagccgtagtgtgaagaggagggtttgtgcttgttgtcaacagttgaatacagatcacaacttcttcaatgacatttctattgccactgtgcctttccctgctgactgagacgggcgcgacggtcattcttgagggggtagaacggctgtcactggcatcttggtcttcgggaacgaaacgataaccgcttcgaatactcaattgactctcttcattctcccggggactaatactggcaaggcaaaagctcatgagggctttccagtcttctccgtcaagatgctcggcatgagggcggtaacgtagaagggatgctaaacatttggtatagtctaggcttaggggttcccacagaccttccccagggaccggtagagtctcagtaatgtggtccacaatagcgcggacggttctgattcgcaaatttttcaaaaagaggccaacagccattcggagtacggaagcacatgtcgagagccgcgacgcagaaggagtttttgtgggcttttgggctcgattgtatattgacctctctgctgcgacaaaacggaatagcgattcaaagatcttgtggcaagctttgtcattgagtgtttgtctaggtgtggaagattggttagttactttaatagcctgaagtgttcatttggggtagttgactacttacagcttggagctcttcttgttctgctgtaatatgtgcttcaagtctgtcaattgagttagcgccagttatttctgagatgagataagatataaagcaacctgccaaaccatccgagcgggccttctgtttgtctgatgagagcaggctaatcgttttgtcgagaaagatctcccccatcgcgtcttttttcggggtcttttctcgacataaaacacatcaaagccttgagtctcaacaaatcttctcgcacctgacaagaaaagacatatcagatcaatcagccagtctgcgagctaatgatcgagtcgataagcgaagtgattgtgtttagtggaaagtggagtggcagtatttgcgaaagctgtctaccgcccgatttttgtcgcgttccgcctttctagactctggaacaaacatagagctcgagcttcacttctcaacttcaccccgccgtcatggcagagctccaagatacccggaatggcctccgtggtctgtatcaggatctctcggctctttcgaactctcaactccccaacgtcgatcgcttgtgtttcgaattggagacccatattcaagacttccgcaaactcctagacaagccagcaaagaacaatgccagccgccaagctgttctctcaggtaagtagccacttggtatcttggctacctcgcaaccctttattcgtctgttttgacaagttactaacgtcgaacgcgatatcctagggaagatcactgttgccgacgtcgaatactcggtgaaccaggatttccaacaaggcgcactgcaacttgcagatgcgctcaacatcgatgaactcgaggcagcagttatgtttctgaccgctcaggaaaattcacaagtgttggacaggcccccgttgatcgctgcgataataagcttccacgagcgtcgcctttttaccctcgagtgtctacgtctcatcttccgagaatcgcgcgaaattgaacatgaagcgacccatcctatcatgcacgaaacactggcccacgttctggaaattaaaaacagccctttgcggaatgcctccctctttgcgcggaaagccttgagttctatggccgacatccagaaatggctgtcgcttcttggagatcaagttcaaaaggcctcagtcgttggccaggaaaatgaccgcgatatcatggaagccattgaattccaacgcacaagtctgcaacagcagcatgagtcactcggagcgatcctattctatatgttcaaagggacatacacaagctgcgaagacttccgcatacttgtgagtcagttaaaaaaaattgatcgcttcgacggactcttgtttcactacattccagtcacaattgtgtcttttgtacagcacggttctcccgagggctctggatctgagaaagaggcacgagacctgcataaattaatcactacatccaaggatggccaaggctggaagctatcaaatttccacgctgcccttgttgctctgtggctgtcagtctacagtggatggtactttgatggtcttccatctccatcagtcgacgcagagaaagaatccgaagagcgtacgaagctgttcatgtcttctctcgacgatggcgcccttgattttatgctcgcaatctgctccagtgtcaacaccgaggaatgggcggaccccgcgcggagcgaattagtgacattactgctcagggaaagtgtggtatcattgcctgatcccgaaccatgctctagctttatgaaggagcttttaatggaaaaccttgaggttttcgtggaatcatgcgttgcaaatatgcccgacgcggtgcgacgactgaagtcggaggaggactcacaacgactagaccagatcaccgcactcagagatggcctcacctctaacctccaccgtggcttggtagaggtgcggactcaccttgaatcccttcttatgatcatttcatttgcatttgagcaccgacaagaagccgcccaagagttttgggctgatcctgatgggaatctctatggcttccttcagtgggcgtctaaacgacagactgttcctcgggtcagtgctttttgcgaaatgctgtgttcgatatccgaaggagaagaaaatgcagctgcggcacatcgatttctgtcggaggaagataagtttatgtcttccaagttcaagcgatctacaaccatgaactggtcgcaaatgttcgctgaactgaagctttacgcgtctcgggtcactgagaagccttccactactacaagcccccaaggggcgccagggatctttcgtccacggaaaccagagcccgtggaaatgaacgagcctgaaagcccagtgatgctgacatgttaccttcggctgataggccacttgtgtaagcagagtcgacttatccgagagtggatgctgcaaaacgaatccttcaatgtagttagcacactgctagacctgtgcagtgggccgattccatcgcatcttcgagcaactacctttttaactctctcagcattgatgactgacaaatgctcccccgttggaaaggaaacgtgggcccgtatcgatgggtggctatcgggaggaacaggtgcgtccggaattggcaaagttcctttggtttccaaccctgccgtttggcaccagcaacaagccttgcaaaagatcggggagagctttgaccagacaaatgcatttgttgttcttatcaatgcacttactgctccttcgtccgactcaattgacgacccaatgtcgttgcctttcccggagaccctaggtggaacttatcgcatgtccgggattgagccttacatcgatttcatcttggggcatgccttttcgcggaagattcaagagcttaatgagtatcagtcccgcctgttgaacttcaactgtctagacttcgttgtggcaagcttaaaatccttcaatgaagacctagtgttacttctgagtcagccatccatgtccgattccccgacgcagacttcatcgctgctcacctacgttcgtttgcacccgtttgcacgcgtggtagactggctttttaacgaagatgtactcaaatctttgtttgcaacgtctaaacaagacgtttcggacgttgctaccgcgtcgcccgactctgttctggttctaactttgcaccggagtctggaggttatgaacttactcgtggacctgcaatcgacatactttaacattgtcaaacctctggtgcattcccagcccgtaccttcccggaccatcgtggcaaactcctcgctagcttcatttgaggacaccgtgctgaacaatctgacactcatcccgtcactctgtctctattgcggcacagcgcatgaacaactcaccgtcatttccatggctttgctggaaaagcttactagttccagaaagctcaacaagatgacttcgccagaactcgtcaagtggcaatcttcgaacaagattgtagaggtgcttgcatccgaggtcgatgtggacagcatatcgctgcctcttgtgttacaaatggaaccagatattagagagcttgatttcggcccgaatgctgctggctatgtcattcgggaaagccttcttgctctgttgaacacctgcctgggaacgatcacagaccgcccaacggtagcccatctgctgctgggcttcgactgcgtgggcaacatcctcgatgtgtcatcggaagggctattcgcgaatcaaagttccttgctgcatgccattgtgaatttcctgaaggcttatccggagatcctcgatggtggcattatatcttgggtagtgcacctcaaacgtatggcttttgaagtgctgaagcatctatggtcatcgaagctggcaagttactacacccttggtgaaatgcgtgctcaggcattcctgcgtgagatgtttgcctaccaaccgatcattggcccgagcactgcctggaatggattccccattgattcagatgaattttggctcacagacgctgccactgccttagcagaattcctgctttaccggagtcatctcttcacatatgccgcaaccgaggttcgctcgacagcaaaggctagatcaccagctctacatgcccaaattctttcagtgttgcttggaaatacgcttgcggataacggtgaaccgttatctagtccttccgtgttcgatcttttcgatttcgcagaccttgatgttgggcgcgagttcaacatgccccagctttacttgctcggtgatgttgctctccaattagaaagcaagcgggaggagggcgtgtacagtatggaaggggtagaggagatgatacaaatgcggaaagcagaactcacggccaatggaccgctccgcccacatgatgaggagcagttgctagctgaggctaatgacctgaagttgttcatccttgcaacgaagcaaaacagcctgattcaaatcaatcgctatcacgccctccgttcatgggtagagctcgttgctacgatgatcacttgctcttctatcgacgaaggaagcaggccggctttcattctacattcaatccaattgattctacctaagctcacaacggcaatcgaggcggatcttcccgaagcacttgaactggcacgactggctgaattgttgatcggtagacttgcgtccgagccatctgcaacagatgcgtctcgaagcggggatgtcatcgacgaaaagctccaccagctctttcaactctgcatccggggtaccaacctggcgacaggaaatgtgttgttgagagaaacgctttacagtatttgttcccactacataacacgcatcacatcgtcggacaagggccatgaaaacctacgacgtcttagccaacatgtcatcaaagcagccggttctagcctgattgagactatgtgcgatgacgcatatactggtcaagagtcgtgccgtgcatccgctcttgtgctattgaacagtttagctgttctggatcgccaaactgactgtgttttggctgagttcatctcgaggtcgaactatttgagtctattcctggatgccttgcgttctcttcccctcgaacttcacaatgctcagggaagcggtcagtcatacccccttcgaaacagtcatattattacaactaatcaaaactcaagacaccccggcactactggcatactatgagtcgcttttatcattacttcagcggctgtctcaaactaagggtggagcaaattgtgtgctcaactctggtcttttccaagccgtgcacgaatcacgacttttcgctgccgatccagacatcggcattggttagtcaatcatatcctggcccaattgtaccttgctaaccccctcagacattgaaaatcccgacgccctccagaggtattacgatcttctcctttcagtccttcaggtcatcgtgtatgcggttttctctcgaggtatccacaacgaacaaattaaagagcagacccgcatttttttggctgaaaatcggccatgcatggtgggtatcttcaaacgatctgccaagatcggaaatacatcaaccgcccaccacgagactctatgtgaattagttaagactttcatggctcttgttactgccacagatttcatagaggtatgttttctcttcttttcattttttgcaatctattgggtcgaatccgggatcatgtgactgactgagtgtagttcgaggaccaggaagtccaacatatcgcccgaccagcgttgttctcatgagcctttgtccactgatgctcactagggaattgagaagaaatgcatgtatcattatgacccggtggagtgcaggcggttcccaggttgagcgattttaccttgaattcatttgcatcacatctaattcgtcatgtgtaagacgtccgcccatttcgatatctcggccttatgatggctatctttcgtaggaatgagtgctatgttcgctcttgcaaagtaacaaagtcagcactcgagttctgggtcgagcggctatgtttcccagacggagaagctatccgtgggggcgtacctagaaaatccacacccagaatctcgcaatgaagctttgggcgcatctccaaaggtcatgacgatagttctttgggaccattggtctctataagattcatgaaacaatccgatatttgagggggcctgtctcggttactgatctaaggggacaattccatagagtatattcgagtcttactgtatatgatcgacgagattagaaatcggagaaaataatatcataatatccatataagtataacaaccacgcaactgcaactttgatacatttgtagggtgcattcgccagtcttttctagtgtcttctgtgctatcttgttggatgtcttttttgattggggttttttccatctcttagctatcatagagagtgtgacagacacaaaacagccgtagacgagtatacttttccattgaaaggaggatggttcagtcccatgtataacctagccctaactctcgccaatttgatagacccgagttaggtgtacacgtgtatgatcctgaggtacaaattgatctggcatatacatgtgatgtggtattgcactagtagtatgtagtcgtgatatcatggatgctcctgccttggtgaggttggtgagtttctagattgcttgcccagctggtttccatagccaccatccacgatcgtaccttcctgtaaaacttcagcttctgtttaccaacctcatcgtaccttcctgttgctattgtctgttgctagggaatcccccaaatgttatatatttgctccctccactgtttttcttttctctttctcctctccccatgccactggctatttttcatttgcacttgctcttgattaccaaaaccatttcttattgctttcaaagctattcaaaatgcacccctctacctttggtaaacgggttccctcttctcgcatcctgctttctaaaaaccgccctcctcctctgaagtcatgccttgccgcagcggactctgatcgggactcccccccctctggagagccttgcgtccggaagacagtacacttccccgacgacaagtgcttcctcgaacgggtcagggaaatcccgtgtcgaccaaatcggaacaagaaggaactcttcaaaagtggccggctcgcggagacgaagtcattcatcatgtacacttcgaatcctctgggctccaaccagaggttcctctccaagcatcctggaggtagtgggcctcagtacgccacgcagtccccatgggtcagcgttgtacgtgcccgttacctcgctgcgaggtattcgtctgccccacgtgctccgcagtccacaccttcctccgatggagatgtttcagcgcacgagtcttcctttgatatgtcttcactggaggatgccctgcttgagcctacccccagtagctcactgcatgagtcttccttcgacatgtcctccgtgagtcatgcgctgcctgatcctgacgtgactttcgacatgtcctctttggccgatagcctgcctgacaagagtgccttcaatatggcttcgctgatggatgccctgcctaaggttcccccccccggttcaccagatggggttacctctgacatgtcctccctgatgcgtgcactccccgactttgatgctccctctgttgcatcgtcccttgcacgtgcccccaagtccatggctgcgacccactctcgcgagtctcgcaagctagctccaaaggttcatgcgcgtgtggttcagacccgcgtcgtccaggttggcccgttctctgccacctgtttcatcaacctttgtgggctcatggttttgttgggctcgttcttcccatgccttgccccagcattttatgctgcgcttgtgctcctctttatctatgggacgtgcttcttttgatgctgacggtctgcactcatgtcctcagagcgctcggcgggcttggcttcctcttccttcctcttccttctcctttttgttattgttgctttctgggtctgctttcttggcgttttgtttttttctgttgaggcttttgccgtttgattttgcgaaaataaaaaacccccaaaaagattgctttctgtgtctgttcgttggcgttgttggcgttggtgtttttgaattccttttcttgttttgaggtaaggacttggagacatgggggcgacgtctctgtctgtgatcgcgaggaaggcagcagagcgtgtggtggcttcatcttttgtctttcaaggtaaatgatcccactcctcctgtcttttatattattctaacaccacgtcttccagggaggatactggcgaacgtctctgtctgtgaacgtgcggaaggcagcagagcgtgtggtggctcaattggatggcaactatggtcagcccttgtcaaacatctggtgtattcaagagctaacatcacgatcaatttcaggtggttaatgggcattgccatcgaccgaacgtctctgtctacggagagcagcagagcgtgtgctgacttgcttccccccctttaccccactactttcagaaacagcatggttgaactgcaaagtcttcctgcttcgtgtgctgacatcttatagctcggtcaaacgtctctgtctgtgaacatgcggaaggcaacaggacgtatggtggctttgtcttttttcttccaaggtgaatatgtttccacctcgtcgctcttcgttttgactacatactaaccgcatattttcctagggagggcttcggggacatctctgtctgtgaacgtgcggaaggcagcagagcgtgtggtggcttcgtcgtttttcttcaagggtaaatatgatcccactcctcctgtcttctatcttatgctaacaccacgtcttctagggtggatactggcgaacgtctctgtctgtgaacgtgcgaaaggcagcataacgtgtggtggctcgccaaaaagggcgaaaggagtatgttttatacctctgcccatggatttctgtggttgtgctaactgacttagtagtgcccgatggtgtccttctacctctttccttttttccttcttttttcaccatgtgttctcgcagtgcgaggggtatggagaagaaaaaaatgaagtagaagccgagtacatacgtatgttcaaacagtctgtgcgtgtatcaagtacaatcctagaatgtattatgcgtgatcacttggagtcacaatggacttcatgctttggcctttagggtcctttttttcgttatacagtactagtgaaccataggagtccggtattgcgcgagggctcggaatatgaagcgggggtgattcttgcgagcaggctgaaatcatttcttgtcagagacctggggggtgcgagggtatcatgaaatgcatcaattagccaatctttccagccctgctgtacagaatatcttgaaactggtatcactaccaactctaacgcatgcctgccactcctactccctcggacccagcacaaaactgaactccttcaaaaccggcgaacgcttccaccttgcaaagagctgcccattctccaccaagatctgccgtagcacctcccccctctccacctctgtagcaggccatacaccctcccataccatcacatatggctccacgaccccaaagacctcccttagccacctccatgccctcccctcctcaatcctcccagccagcaccatcccccgctctagttcctctagaaaaatatccctctctcgcctctcaaccgcagcccgcatcaccccaagaaacatatacgaccgcactacaaagtccaactcacccacctccgccttcacgcccatcgtctcctccactgcaacagcagctaaaaactttacctcctcctcactcccaacctctccctcccaccccctataccatgcgtacgaccccaccccaccatccggcaacccacaccacatcacctcactctcccacacactatccatatccggctcagcaacctccctcctcgccgcactcgcctcccacagctgcgccgagtactttgcttcccacgtatacaaatcatacgctccctgcgcgaccagtatgccgaagatattcgggccccacacttcccgggaaactgccttggctgagccagaccggctaggggaaccgagccccatgtactcaagccagaagcgcgcttacgtctccgagtagggcggcacgctagtgtagaccgtgcgcaggcgcgtgatggtcgtctcgagtgtactgagggctaatccagtgagagtcgcgagcgggagggacggctgcctgcggtgcgtgtacacgatactgtgggcccagcggggtagtttcgtggcgtgtacaggggctcgctggcgcggcagccccagcggggagtcagagtcaggtaagtcttagaggtcaggtaggcggtagaagcgcgctgtggtacgctgggtaaggaaggcagtggagtaataagagcgccatgcggaggagtggaggagggcgtggtgtatggtgtagaaagactggaaatcatcaggggaggggaagtcaccctcaagttggttggtggagcggtagatggccgctgcgagctgggcgaggtagaatatatccagggtgctgtgatttatcagtctttgtacttgtagtatagttcatatccttgaaacttaccgattaaacctcaactcgcccgcgccgaacgaccatccacgcgcgtgcagcttctcgacaacatcaaagacgccactgtcgagccacagctcctcttccatatagatgaatgctatccgcagcactttctcgtggcagtccaccggcaccacgccgccttcgacgtcaacgaggaattctttagcgctcatggcgaaccctctgataagtaactgatgatgatggtggaatataaacaagatcctcaatcggtatgccaggggtcaggatgcaagtaagagctggtgatcgatgttgttaagtctaagcatattgaagctaccatagccatgagccacggcagaaaaaaaggagtcacagccgcggggcctgtacgaaaaggaattgggatgaaaatcatgtatacccccgggacgaagaattggtcgagaagagaatgagattttttttaaaagcgtatatcggattttgttcagttataatgtattccacgtgctcatacaaatagcatgatcggtatttcggggaagcttatcacttagggctaattgtcacaaagccgattccgagacccgaaatctgccatgtcatgttgcgtttgtcttttgcgggcgacattagtctacatgcagacttataagttagctttttgctattgccgggatggaagcggatatttttatcaatatcaatattattagccgatggtcctcttcagctctcgagactcgaatgtcgaggattgacatacgggactacagctacatcagaaagaaaagaatgcaaggaatgaaagcaaagcatattagaagaatattcgagactaccactaaggcgaaaatttaatctgtaacaaactcgtgatgcaagaaagcgccatcataacaccaacccatgacaacaataagagaagacggcacgaactcgcaataccactaacaagatcaagtagatgtttatgtatgttgcaagaaggggaatagttgtaatgagacaacccgcaaagcccggccagctgagaaagaactctatacaagtcgtgacgtgtaaatgcgctgaaacagatccagagaggtgtaaagggtgtgtgtgcgtgaggttacggggggagggtatgagacgccagaaaccggaatggatacaagctccagtgcgagatatgagataatcaaacgctcaacggatcgaaggatagcaagaaagatgaagatttaggatgggtgggtggatcatggactggggggaaaagagaaatatgccatgcagaatgacaaactcagatatccgacgaatggactacggtggtgtaggggtttggccgaactctgcgtggtcgtgaggcttattgcgggatcgcatatacatggcatcggaggccgcgtcggccgccggagaatcaatcgcgcggggaagactcctgtgctgttgctgttgttgggtcacaacctctcgtgcgtagaactccaccagcattgtcccatacgactctagttcttcgacggtgatggcgagtcggaagtcattcagaaggaggaattgtagttccaagtggttgagctccaccagtggaagaccgccaacctgtatatccgatcatgattaattgtgatccacgactcagatataagaatcaaatacctttgcatatcgcgaattggtgtagaaaacatcagagaagaacttgctggcacaggtcacggcagcaatgaccagtcgatggatattaaaactatcaacgacaaagaaatgtgaaagtgcctcggcatccgactgaggtgaaagggtaggtgaaattgtaggattcgacccttgcgggtcctgcgcagtaaagcctgttgatgagggcgggggggtcgccattaaagaatcctgcgcctgatggaccccaggagattcagtagatgcggacgaagatcctgattcttcggcagaattccaacggtggtgcagctggtcgatctgatcacggttgaccagctcggtcatgcggtcgaagtagaccagcaagcttagaaagacttcgtaggtagtagggcaatatttgtggatgcgagtcaagtaactcaagatggtgatggtcgggacattcttgccgtgaaatgcgagtacgctggtagcctgtgggctaaggttggatgtgccctcgggcggcgggatatggcgatgtacatgttcatgatgcatatcgtttgtagtcgtgatcttggtcagaagcccagcgaccatctcgataatctccgtgaccggcatggagctaatctcatattgtcggtggtgcgatccagttccgggagtgtgtgagctccgtgatctcatcaggtcctcactagcgagactctgaatatgggataagctttggacgcgaatgcgactcggcgaactggcttcggaacctggcacagactgcatggactggtaggtgggttggagacgcggtgaatccggcgctgaccgattagaagagtatgagttgctcccagtctgggttggtggggtacgtgttgagtgagagtccggaggaaatgcatggctcggatgagacgtcatcgagggcggtcgtggtatgaagataggagtatcggaagaagcgcgggaagcttgagaaggtgtgtatgggtcgatgtaagccggcacatcattcgcatgcacaggaagccgagcagagcctatggacggtggggcagtagaggtgggggtggaggaggaagtcgagtgagtgtccattggctgggcgaaagaataaactgaatccgaattgattgcgcctcccaacgtgtcgatatgatccgacggcacgtggttgacgacgacggagcccatgtcaaggctatcgtggtctgtttttctgcgggaacacgggtcagcaaggcggtcgcagctcgggctgtgttgccactataaaccgatgggagatcagatgggaagaatcgaaaatgatatatggcaataccaaggaatggagagataaagagagggggttgaatacactttcgactaccacaagggctagaccacagatcagggaaaaatccccggttcaagacgagagagagagggaggtgggagatcagcgacagccgatcgaatccattgaaaataaaataaaaaggtaacaggcgaaagcgaagagaagaacaggaatagcaggaatactaacaggaataacaggggaaactaacgcgtaagtaatatgggaagttggggaagtggagggagtttgggtcaaggtgagatcagtgaggtcagtgtggtcccccggagacatatgaaacaggattaagacattgaacatgggctttataattgctgtttagactaaatatgatataaagactcttctcaagactgttacacacctttcactacaaagactcttaagagtcttcaaagagattatcgccgtactcatcaaacatataaaagacggtgtacaatgatgtagagctataggctgtatattgacgaatgatagaaggatctgcatccccgtggacaagtggtgattcagacatcggaaatgtcttagccctatttaccctcgccggaagggtaatacgagaaggaatctatatgaatgtggatatttcccgtatagaccatatgttgtacatctccctttgtccggccatagacttgcattacataggagcatgacagtttgtctgcatgtgggatgtgacctgttctgcctatggatctcccaaagtctgggcagtactgttctacagagtattacagtaccagatcactcatgcgatttggtaataggccaagatatataaatctggggttctccccggtctattcaagtaactataccactcggcagttatgacccaatagccagctggccgagcacttccgatcgagtccttgagctgctcggtccttttctccctacatagcccgataaaggtggggggtatagcagcacccgtacccgtggactagtgtcagacttgtcatattggctctcagacacagtatatccccggtgggggcgcatagctaaatgcgaaaaccggagaactgggatcatgaaaccatttcattggagattgacacaatattagatcacttattaattcgtcactcccggcccagtgtagccgttgtctggcaggtagagatgtctcacggcaccggccttggtcaggaccacgagacgaatgacaccaccggagctgccgtcccatttgatcgcctcctgcaaagcacttcgcacgaaatcgatgccctcttcctccgtcatctgttcccgccagtgggcatcggtataaccgtagatgtaggtcgagcccgaaccgccgatagcgaacgactgcttgtgaagggatcctcctagcggtatcgagtacacctgacctccgtgtcgtgcatcccatccggcaagaatgatacccgcactatgattcattagcattggatttggaacaaatgccgatgatccaaagactcgggtacagacctcagcgcgtccttgttctcataacacaattcctggaagagtgatgcggcaacctgtgtggtaggggcctcggtgttcgttacgccgtacatattgagatggtaagagacaatgtcggccacggcttgggtgtctgcggcggaacctgatcggcagcaccagatggtatcgtgcacctgtgtcaatttgtcggtgactcggttggcaatgtaggcaccggtggttgttcgactgtctgcacccaggatgactccgtctttgaagttgatagccatgctgttggaacgttaatggaaatgtttctagatggtaaggttcaagagctccagctcaactcacatcgaggttcccaagctgaacgaagaacgatgggttagtatatgctgtgaagctccatggttgataatctcatcctgggtttaacttacttgacctcgccggacttcaggtggttcatgtcgatgtgaataccatctagagatattagctggttgctgtcggcggatgacgatagctctcctcaccttcaccgagcattcctgatgttccatgagtggcgaccattttgtgctgtgttcaggagaaagtggagaaagtagatagatgacttcaatagacctgataaaagagcaaggagaagagggaggtccagggaagaagtagaggtgatgctatcatgaacacaggcagaagctcacaacgcggcagctcgggcggtgaggccccagcccctgcgattgacttatcatattccccgcgagactcctgaagctcaaattcccttttcttctgtggttatccctattaacttaccgtattcatctcccgtcgcattcaagatctcttctagtcgataaattggcaataccagagtccccatacctcgttttctcgcgtcctctatctggtccccactcttaaagtgccagcaccatgtccgaatcccctccgcctccgtcctggagcatcagcaacatggccaacagtgctgcacaattcatgcgattgccggttcttgcatcatccggtctggctgttgttgcaagtgggctcctctacttcaagcaaaagtacgctattagcatctaggccatttgtttacgaagctaatcgctttccccagtgaactaatttatccccgcaatgtccccgtggatgcccgcacaaatgttcccagtcctcgccaatttggtatcaccgactttgaagacctccagatccccactcccgacggggagtccttgaacgccctttttcttcggcaacggccaggccgcttctcgcgcaatgtgacagttctaatgttccacgggaatgcaggcaatatcggccaccgcgtccccatcgccaaagctttacaagatacacttcaatgcaatgttttcttgctagagtatcgcggatacgggatgtctacaggcacaccggatgaagccggccttaagatcgatgcccaaaccggccttgattacctacgacagcgcccagagacaagggataccgagattgttgtctacggacaaagtttaggtggtgccgttgctattaacctggttgccaccaacgaggaggaaggtgatatcggaggactgatcttggagaacactttcctgagcatccgcaagttgatcccaaagtatgttttcgaattatcagaaagattcccgtgcgataatactgacttcaaaccagtgtcttccccccagcacggtatttggcacgtttctgccaccaatattggaccagtgaagatgtgctgcctaagatcaccaaaactccagttcttttcctgagtggactcaaggacgagctggttccgtgagtttgcctacgccaagcgtcacgctttctttactaatattccttagtccgtcgaatatgacacaattatttgccgtttgtaactccgaatgcaagatctggcggacactcccaaatggcggtcacaatgactccgttgctgagccaggctactttgagcacattctttccttcattacggaagaagttctacctaataaacagtaaaccgacctgacttacttatttgcttgggcttctcgaatccctagcgaaccctttgcctaggacctcccttcccgggttttatttcccgccaagaagtgcaaagacttcaagctttgctgcaattgcttggctatctcgctttccgatggccaatctaaacgtctggttaggcccttacaacataagactcaattgacaggaaccgttgattatgaccttgatacccctgccgcgcaaccaagacacgaatctcactttgcatccgttcaaacgatcacggcccatacatggccctgatgaattcctttattatccccgagtcctcggggtgaaacgccatacctcccatttgagaatggctcttttcttctttctatctcaccttgtgatttacattcgattcttgtttccttcttgtttcctccttgctgactattatcatactcgcggtgcttacaagaatatcgggcgctgggcgtgtttcttttctctgcttcatttttcggcgaacccttgcctttcgccttgcttatcagctccggcaaatttccttcttgtgcaaatactaaaccaagagaaccctttgaaatcgggtacgaatgtaataatcttattcatgattctttcgctgtgcagtcctagatccctaccaacgacgggctacgttggcattgtccggtcgttctaaagactcttgagcttacttgcaaggtagaggggaagcggaacccccgggatctaaagagcgaggtcactaaacaagaagcccattatccccttgggtggccacagactcggtaactatcagccaatgggcaccggccatcggcactttatgtatcggaatattgatcagacgatcaaggatatttggcgtcgggttgtggaggtgcatagaactgcggcgactttgggtgagaggtccggggattggcgatgataataaacagatataatttgtgttttggtattggtgcttgaatatattagaatagagatatttgccagcgagtgcattctttgaatctgaggcaagttgaaataaaataatgttcggttgctgtaccatgatatatatcaccgactcctgactgatacgattattctttgaacgaacccatgcatgataatccacaagcacgttcgtgtcacttctttatttattgaaaacacatacatgcatgtaagactggcgattaggatggcgatttactagaaatctgttttagaatcagtggccaattctttggaaatacccatgtctattattgaaaccacgagagtttaaagtcccaaagatatataaaacatcagacaaatggaatggggagatacatataatacacgccacaaggttttagtacaagagaaacaaactacggaagtttctcggcctcttccaccagttcctcaaccttgaagttctgaacatcaccccgggtgaacatgcgaacaagctcactcttccgaccagcagcctgtccctcaaagtcatagaagcgctgcagacagctgacaagccatgttgcctgtggggccgaaacaccgccctcgggcataatctggccatgcataagaacaagacccttctcatccgctagatcgaggtggtgagtaagagtagtgtgaggctgggcaaacgagccatgcatcttgtaagcagccagattcgtgaagataacagtagaggtgtggctattcgaaggcgacagagtcgatccctcagcaggcgggtggaaagcccattggaggaagtgaatatcggcaaccgtgccaacggctccctcgggcgattgctctgcctcttcggcagtctgcggacgcgggaggggcaagatgaactgcgggttctcgcgtccggcatgcataatgcgattgtatgtgtcgagagggatcaccgcggtgatggcatacgggttctctgcaaagcggagacgccagagcgcttcgatctccttgactgggagctcgcggaccttctcgatatccaggtaggagctgagggccttgacggggctcgagtcgctggagacagcgcgtgcagccttggcgatgcgcgattcctgtgggggagggggtgctttgaatgctgggggtgtgcctgggacggtggtggtggatgtaggagctccaggctctggggtagctggggtggatgctttgcggcggagttctttgattttttcggtataggcttccttcaaagactcgactgagtcatgtccctccctggataaaatacttagcaatatgcaggaggaattgttcaggaaagtttgctcactctttggccttctggtccagcttggaccgatacttttcgaagacatacttgggatcgtggtgtgaggcgaggaagcggacgtcgtggacttgcgcccaccggcgctgctgatgacgcagcaagtgggagttgccacggaccaccgattggaatccttgtagtcggaatgatggcattttgagtctaaagagtaaataaaatgaagctccgaatctcgaaatgccgggccggactagttatcagatgacataattactgacataagcatattatttgttgccatattattaaggcacaaagtgaaataaactaggcatcaatattacctcattaggacatgtggcttccttatattttactgaagagtaagtatttcaagaatcctcactgggtagaccaaccgttagctactatgcttctgcgagcctggggcggtggtgagcagaattgccatattgggccgtatcggagagaccgatgcaccgttcaacacagcatcaagaggattctttttttttttacccctcgggcttcagagtaggtagccataacatgcaacaaaggactaccaagaaggtaagtattgatatacggtaaaagaaatcgaaacaagacacgtctagcttttctagcacggtatcaattctccaaatctctatgttgagctttccaagttacacctcttgatcctttgatctgcaaatagtcacaaggatatttttgtttcttctttcactgttcgaagtaactgacttgactcttaaagcaaaaaaccgtcaacataccatctgtacctacctctgttagctccaatatacgatctctgtttctacggtatatccttgcatgtttctgaggaaatagattgattgatgttcaacagaaaacctaagtgccacctaatgattgcaaaagtctttcctaccaattcacatctccatacatccataactcataactatacacctgtacatggacccacctgtgcccattagtcagcacatcattgcccaaccaaggctgctcatgtggaatgggccctgaactataactttaaaggcaccgtcatctacctaaatccagctcctcagaagcaaacccctcatctaccaatatcctcatcttttcgacatcccaatcttccccatctcagaaaagggaaacaaataacctaaaaaaaaatgccaatccatcaaaaagaattctccaccccaccaccccatccaccagtgggcacgcccaaggactccccgtccgcactaccctggtactccatcgcgccgggggtatgggaatttctgctaaatggcgacggagagcacaaggctgtgctacagtggtgggagccaaatactgtctctgcacagacagagccaataacacacacctacatcgaagaggtctgcactctgcgcggcgggctggaagatctgtcgctcggacagacgtggagtattggtgcctatgcttaccgtgagcctgggatgaagcatgggccatatcgggcgacgaaggatggatgcctacagtttgttaaggtcgtgccggcgaagaagtagggtttggaggcttggattttgagtgtgtagctggggtctacggacattaatggctacatctttggctatatgagatttgggtattgatgatttggccttttttttggagttgtgttagagtgtctctggctagttgtttttttctttctttttgctgcaggctatgccaaatatgacacattaaggaatgaacaactcgagaactttatgcaaggagttaacaaaatccggggaagcgggtctgtggttcgaatcacgatagaattaatacaacttcattttcttctctaagaaagaaaaaaaatggtggcctcccccaatttgggtgatctactcgtttaaactagccgcgtaacgggttctatgcacgtgtgttgttagcgaatctcaatcggtcctacccaaacgaagggaccagacgggccaatacctgttaggattcctatgttctgagagatctcgccctggcttgaacacgatctccggattcttgcggttaacggaaggtgtacagccttgggcccagagactgcaccgacggtcagatacaactgagccaagtggggcttggggtgaaataactagtcggtctggtcataacagaacctttttaaaatctttctagggatttgattggctggatcttgttcttctcagttaggtaataatgaagctattcagagttccgaggtccttttgatacaatattctatcgtgtatgatgagactccaaactccaagttaatgcaaatgatttcgcaaagaaagggacatgtccaacgcttttgaaacatttttcattttgtttctcaggtcatcaatcatcagatcctgtccgaatccgaaggttagaccagcacatctgtaacaaatgcttcaacctgagttgcctcagcctgagtggggctatcttccgcagaagtctcggtctcaggtgcaagttcagattttccctcagggtcctcacggacaactatttcctggtcctggtcccccgcttcctctttctcttccttctcctcggcctcttcccaatcatcaacaaccgcagtcgcaggggccttcgcacgccaggacttcccaaccccaacgccagatcttaaaaccaagcgttccttcttcgccccgtcactatcgagagctgcataaattgacttgctcacccacgggttctgagcaggagttccagctctcgaactagccccgctcccacccttactcttcgaagcaacctgagcccaaccaccgtctccagtactagcctgtaccttagcggcttcacgggtcgccttagcctcgagcgcggcgacacgacgcgcttcttgttctttgctgcgctcccgctcgcggagcttgacgcactcgcggacgctcatgccgccgataccgatggtcgagccgctgcccataccgaagagaggaggtgtccaaacaaccggttttaggacgaagacgtgacgatgaggttctgggtcgtggctttctgtcacgaagccccagtctgcggcgagggagtgcgcaaatgcgcggagagtggatttcgccggctggaagcggaatgagcgggtgggtttgtctgctgctgccagggtgtggagattggactcgtaggtttggagagttgataaaggtaccgagcatgcgagctggacatattggttcagagtctcttccgagtaggggaggttctcggctgtgatggtttgaagcgtggttgtctggttgatgtcgatgccgagagcacctgctagggagcggttccgctctagacgcgtgcattcgtcgtcgcaggccaacggggtcaactctggctgccgctggggcgtctgcacctggcccttggaggttacagccttggcggcattacagcgtctgtcttgtcgcagtcgcccacagctacatgtcactgcgatcttggacgaacacggtgtcttctctggacacgcgtatggcgcgtggcattgctctgtgcaaggatggccgcacaccgtcttgttctttccacagggttggctgcaaggtttggttgcatcttcgcaatcctccgggcgatgacagtccttccggcagaaatgagagccacacttgagcagctgcccgcatacttgaccgcagcgcgcatctgtcagccagcagggcacatttttcaacacccgctttccgcacagacacgccttctcggtcaagaatggacacttcggacagttctcctcgtctgtgtggcaggtatgtgcggcttgaggatggccgcatcgctttggacgctcacaggggaagttgcaagcaggtggctttgcaccacacggctgcggcggatacagaacagatcttccgcaattacacggaatctcttcgaacactgcctcccggcaggtattgcaagcacccttatggcaaacctccggacatgtgtgccttccgcatttcagcatccggccacatacgcgagtgcagatatgctccgcttcgatgtcctcatcagcagggcggagatgagacctgagtttacgacgcgcagcctggcgctcgttggccctttgctctcccggacaacacctttcagtgcatgtgtgtcgaccacagtgtagagtcgccttgcacatgcgtgggcactggggaggctcattcttgccctgatgacagattgtcaggttattagtacgaccgcagttgcacttgatgtagacattgcgcaaacaagcaccgcaggatccaacatgacacagcttctcgcaaggatggccacatggtaatgttttcccacaaggcttttgacaattcaagatagggtcttcgcaggatgttcgaggtgtatatcccggggtctcagataacggtgtcttgccacaggcgcaattgaggatgacatctggtgactgtggacagtgtgcaggatgagggtcttgcggatgacagttcttctggcatgaatgtatgccacaatcaaatggacggttacaagtctctccacaagcaaagcagccagtccactcatcttccgagccatcgtcgcgaatgattcgactgtcctcctcatcgtccttagacttacacatcatctccgtctgcagttttccacagtagcaacgtgcatcaatgctaacctcgcacccaccacacaatccctcatgacacggaagtggacatgtatgttccccgcacggcaacaactcaccacagatttcgccacagctccatccattctcataatcggtatcccgacaacgcttctgcgacgaattacggccacagaaacaatcttgtatcggacccatagcagtacaaggtgtacaaggaccagcatgacaagtcgtgtcacaaggatgggggcaacccttgcgaggccgtgaacaagtctgaccacacgagtgcggaggtaaaccgggaagtggtcgaggatcgacctctttctcacaccagcaagagtagctcgagggaaagttttgctgataaaggttacagcccggacaacgccaagcgcgaggagtggtaattttctgcccgtcctcttgagcagaagttctctgtgcggctgcaccttcattcgtggaccatttcttcacacagctcagatggaaaacagtccagcacagctcacaagaccagacccgagacctgcgacctagctcgctgcagcagatagggcactcgtacaggttatgcgatatgtcttcgtggatgcgggtagccagatcgtcggctgtggacttcgctgtgactttaggtggcggcgccctaggctgcttggctttccccttccctttcaaggatggcgttgcttcagaagctcgtccttgctggaatgacggggcgcccggtacaaaatccggcacttcgggtcttaatgtgttatcatgtgaatgctccgcaccatccaatagagggccatttttggcctggtctggtcttgtcaacttggcttcgaagccacgcgctctcatcccacgggttcgcgcctctggtcctgtctcttggctctcaagtcctccattctgacgaggtccattatttctttgtctgcggccccttccttctctgtttccgcctcttcgcgaattggacggtccatcttgttgattgggctggggtatcgtattcggctgtggttgagactgtgtaggctgtgcttgcggtgtagcctgattttgaggttcaatcgcaggggttttttgctgaccgtccggcttcgcagaaccccgccctctgcgtctagatggcctggaagaacgtgggggtcgtggcccagttgggattgaagtctctggctgtgctgttgccatagctgaaaatgcagcggatgtctgactggagactcctagcgtgctcatatgcttccggtagtctttctcacttgcgcttggcttgaagagggtaattggtagtcgactgagtgtgttggtataacgtagactagaaaagtactgagagtgaaatgagcggaagctatacactgaataaggcaacgaggaggaaaatcaaaggcaaaagcccgcttatagaatgaagagagaaagtgtggcacaacaaattatccatgaaggcgataaaagctctcctggcagaattgggcggtgcaggaggcggtgacacagtggcaagccgctcaggtgtgagtcaggaattacatcacatgactcattgtgcctgtgccccggtggtaatgtgggccggcaatgtataaattcgagtcatgcttcgtatctgagggatgatatgagccggtgtaatttatttgggcttggttgatgcatgcaatcacaaagtgagagggagaagaggggtgttggactccactttatgccaagacatcaaacaaagacctagtgaacgaggcttatatctataaaacagcatcttgctgcatatcacagaataatcaatcgggccttcgttatgtgctcgatattaatgagaggagctaactccttcgcttccatgcctactacaaacgaaggacactagaaaagacagccaaacacattatcaatgcaatttagtcctaatgctgaattaatgtagacaaaactacaaatatcgaacctagcgcatcaaaaaaacatggcgctatgcaaaataaccagcccattcacctcgtaacaaagaacatcgtttgattgaaatcatacacacatcgagaataggctctaaatgaacacaacaatctcaccacgatcgttacgtcttagccgtaacgcgcggaaaagatccttctcatcatcagccctgcgatcccggtccacccagccgcgcccattatcatgaccatgatcagcatcatactcctccgagagctcacggtggaagcgcttaagcgccttgttaagggagcagccacgctggctatcctttgggaccagcgagaggaagtgataggccagatcgcgctgcaggtcctcgtccgagcgcgccggcggccgcgactgcctgtagacagccacttggtggccgttcgaggagtcaatggagacacggcgctcgtcgacttgcttaagacggcgggagggtctgtcgccatcggtggggtttgagctcttgcgcttagatttacgggagtcatcgtagtcgtctgcgcgcgcgcggtgcgatttcttgttcttgcggacctcgagctggccgtcgccgctggagaaactaccgcggcgggcgtggacaagagctttgggggcggaatctgtgttggagccgttggtgctcgagacagctgaaccgccgaacatggaggagacgaggcggccagcgcggttcttcattgagatgccgagacctggatcaccgttgccgttggcttctttgccgttgcggcggctgcgcttgatcggggacgaggtatcttggtaggcacggcggctggtttcggggctgtcgtcgccgtcggcggatggggagcgcatcatccgattcaggccgccggtcaggccggaatggttcagcatgggtgtgccggcattgttgatgatgctggacggagcatccatcattgaggtgtcgactgcttcacccggggtgctgagaacctctgcttgaccgcgcttgcgcttcttctcgctgacagtgccgggggctttctcctcgcgacggcggtccttcttcttcttaggtgcgggcgtgacgaactctgttgacgcattcgggggcgatgctgagtgcgggatgttgccggcaccgtatgaaaagccattctcctcgaatgcgatatcgtaatttttaccctcgtcatccgtgttggggtttgtttcgacgcgagtaagggactggctgggctcgaagagcgatttggcattggggttcatcttcatctgttccttgggtgcggcaagggtgaccttggatgcgttcggagtctcatcggcgacgaggtaatcgaacacattgacggccttgtcattgttggccgggggaggagcaggggccctcacatcaccgacaggagggggagtgggagcagggggaggaggagcgttcttcagggcctcgccgtctgaaccgtcgtccacacggggttgctggtgacggccgttgggattctggttgggattctgcttgttgttttgtcctttctttcctttctggggcttctctttatatagagcaccctgatacttttgcgcctcggtcatgcatgactgtggtggccggtctcgttagcggatgactcccttgttgattcaataattaggaccctagtggagtagccccacgaccattatgcgaaaatgcgacgcggatccgacgtaccgtatgagctctatattccaatccgtagaaatgcaccatacaatcgatacaggtgaaggaagcgccgcgacattggccgcgatgaggatcgagctttttcttagtgagaacatcaccacatgcctaccacagtgattgttagcagcggttcgagcgcggcacacgcctcagacatcatataggacttacctcgcaagagaaggagaccattgttgacactaaagatcaccctatcaggtgcgcaaagaagattttgagggcgggatttttcaagaggggggttgtatcccttgagaagtccagcacaaaacgtctaagcgggggatttgctttgatacaaactgcgatatctcggcttttcctctcttttttttctttttcttttcgcgtcgaaaattggcgcgcaagtccacactagtctcgatcgggagccgggctaggctattttgggtaatatgaacagcctgggcgcgtcgagggagaccaaagtgtactccttccaactattttgggaacattcgtcgtataaaagaatgcaaagaatgggagaaacccctgatttatcatctcttgactcggcacatgtttcagggtaactggaaaggcgcagatcccatgcggacatggatggctggcctgtcaggagaccccatgctttcattcgcttcttcccaggatacgagaagtcagactggccgactggccacccttgaaacatcccatctcgacggctgtatgctatttttggccccaactcaaacactcttaccggactataccgacatatgctaagatccgtgatataccgccctttttgaggtttccatcatgctacgcgaaattagttgatctgttggagggttggtatcgcgagggtacgacctgacgacatcattgctgttgctgatagtgaagaaagtttgatcggtgctttgtgctaagacaagctcggtatgacggaatgcgccttttcgtctgctctgcggtttagggatactgtctaggcctctttggtcatgcgcgccatcttctacacttggtcaccaggtaggatgatctttgcgcgtagattgctcgggtcatgcactttgtagggatcggcaatctagaggatgcgggacatgtatactactactagtcgttgaccggcttgtagctcgctatcatttgtacttttataggattgaggtaggctctccaagtatctttattttctgacatgtgtaaatgagcaaaacccccaacagatatgctcgggaaaaagagctagaaactaatgataagaactttcgatacctcgagacagacctctttttatgccaaagccacatgcataacacaacaagggtatattgattgatattgacatagtcaacctacgatttataattgtacaagggagaccagctccataagcgtgtgcaacaaggtgtctaagaagcatccaagcgctgggtataaaccagacaggacgagccccatgtaatcgaaagaatagtcgaaagaatagttgaaaagtcatcccgtcaaccacgggtcgtcctaaaccacacattagcaaccaaacagccataaccacgcggcacaacaagaagtcactaactcttctttcgagatctccactgcaggaccatcatgctgccccgtagtctccttcccagaatcagaccgagaagtagctgacccctccttgccctcacccaccttatcgtcctcactgcagccgcaatcatagaattcccccagattggtgcagtcaaactcaggcttatcaagcatcgcattgacctcattatgaacgaagcaagcccagccagaagccgcattgcgcgacgaaacctgaggcggatacttgctcaaatgctgcatgaaatgctcagcacattctccactgatgtcatcaatcgttagtctccgatctggcacagagcacgtaggctaggaatctcattaccaaggatataaccgagcaaaaaggtagatataagagcgcagagcctccttttggtcttccgtgggcgtctcggggaaccgcgccatgacagtgtggaagtacttccaagtcgcacgacctaattcagctctggaaaagccaccaattctgtaatcagcaatttgtccaattgcgctcgtgcattgcccaatgtgtccctccccggagcaccttacttgactgtctcattgcctagcttcggcatcaccacgtcgcccttcagtgtgttatcttggatggttatccccggcgcggctgccggtgccgagtggtcgatgtggcctggagcgcggacggcgggactcggtggcccctgaggtcgaatgaagaggaagaatatgaggcatagtgcgatcgctgtgctgctgataatgcgccgtgtgatttgtcgattcgccatgtttggggcgggtggtgatcgttggggaaaagcaatgtcgcgaagcgtccggtcgcgggagcacctggaacttgtgagcagggaatagtcccacgcggaatacgagatagaagatttcagctgaggatctgagaaatgagtgctaaagggctttgaacgaaggggattccacgcttgggctccggggaggcacgccacagcttagtcatgggttcgccggggccacaagtgcgagccctagaagattcctaaagtgtctgtcatacgattgatccgtatgaaacaataacattcagagactctattcatactaggtgagcattgctctccgaatcatagactcagcccatagagacccacatcggatgtgctccgggtttcgacttctgaagtggatgcgtaccctactagtagtaatacattactgtgctcatggatgccaaacatatatatctacatcccatcatgagttccacctactgaaatcgagtcgctcaaacttggaggtaagtcctccttgcgtgtaccccagtcgctctccttgttcccaagtgtcagctccagcatcatacctcgagtaaagaattcatgtccaatccagttcttggtgtagggctttccattgagcttggcactctggatatatatattcttgtaggttttgtcaaagttgacattccgaatggtcgcagtctgattggtttcagggtgggtgattgcgacggccttgaagaacggaggaattatcaggtacacattctgaccgggattcgggaacaggcccatcatgctccatgccaggaatgagcccatggctcccgagtcgtcgttgcctggtagcccgctatgcgtggcgttgaatgaagatgggatgtaagcgtgggctcggctggcggacagaccagggcgtcccgcgtagtgataatcatacacggtcaagaagacaggttcattgcccatgtctgccaagccagaggtgtggaaatagtctaatcgagacacgaaggattctgggccgccgactatcttgatcaactttgccatgtcatgtgggacaaaactatattggattagcgttagaagctgactgggaagaaagagtacacgcacaatagatactcccagatgctggactcgaatgtctcggaaggattcgaggtgagagagcaccacgacgccagagcactacaggcaataggatcctgatagccccaggttccgttgatgtactttggctgaaagaacccagtaaagccagtgtctgttccattccctaggaacgatttctggtcttctttgtacaagttctgccagttgccagaccgagataaataagtggtgtaatcatttttgccgaggcccttggctacaacggacagaccgtagtcattgtacgcgtactccagggttcgggagatactccgtgaattagtcccaaatccaatatagtcgaagtccagatatggaatatagttgaggtgcttccagctctgcagaccccctcgcccttcatatgaccattcgagtggctcattctctgcatcgttgaccatagctttgtaggcaagttcccagtcaatacccgtcaggttcttcacataggcatctgcgagaacaatatcggcattggaacctccctgcgtccagcctttgcagagactcatgcggcaatcgggcagccatccttcgtgcttgaaggtgtccagcaagctacggaccatctgtgactgtgattttgggtcaatgattgtaaggaacgggtgctgtgctcggaaagcgtcccacaggcagtagaaagagtcaaagtatggctcgtcgcttttccatagtggattttccccggtcagatcttgaggtgataacatggtacggtagataccactccagaaactgctgatcatgtctttactgacgccacccgacgtgaccttgataggactgagcttttccttccatgcagcctctgcactcttacgtagatgatcaaacgcatcctccggttcaggcacttccgcttcggcatttttacaggcttgatccgagctgacaaagctgatgcccaccctcacagtcacaattccattctttggacgaccaaatgacatatagcctccggcttgaaggtagaagttgttgaagccgcgagtgacaaacaactcctgcactgatccagctcggtcattgacccagatcccggcctcatcgacctcagcgtcaccaaaatcagcacagaaatatgacttgtaagagccagccccgaaactcggcaagaaagtaccattgcctttaatttgacctttgtcggcgtcaaggctgatggaagcattctgtcgactatcccacagatcagttaaatccaccgagatcaacggattgagatcggttccatccgccaactttccctttgggaaggtaaatcgatacaatgctgtgcgccgcgccgcagtcatctcagccttaatgccattctcgagtgtcagggcaaagtagccaggttgcgcaaccacagaatcattcttgtagtgaaccgcgcgagcagctttagggaacttgcaattatccaagatattgtctttgcagtactgtgggaacagaggaaagtttcccatagacgggttcccgcctgtgccactgtcatgcatatgcgaaaagccagtgacattgctcccatcagtcgaaaaacctccggtattctggccatcgacatcggcgacgggtttcgccatgccatacgggatgcttgcacctgcaaagacattaccgccattggttgatccgatcaggggattgacatagtggagatcatcttgggttgctacagtgcctaggacgcattggaggagtaggaggctgcacaacttatttctctgcaaaattgccatgacgctctggaatgtgaagcttggaacatacgtaatagcgcgttgggtttgcggatttgggctgtcaataacacgatagacgcagaagatgggaagagagaccgagtcccttctgcaaggggtggtttttcatatcgctgtgttgcaacgtcgcattgttcatgcgatcgacggcctaaatagtgttagtgttggagttacggagacctttgagtgcggggttagtgtatccccaagtcaacaatgtactgaagcatgttttgcagttccgcattgccagatgaaagcgaaacaaggccctttcgaatcatcctaaggtattgacttcaaattatagccgtagagttgagtctctttataagtacagcctctttccaaggttgagactctggtcaaacaacgaatatttgataaatatagatcatgtgatccactctctggccacttgacattatcatttcttcgtcacttttatcattcacgaaaatagaacctacacttcatcttgtcatcccttatgccatctgcacgggaatctactgcatctcagtacaccagactacaaccaccaagctttcatggattgatacttccaagatgaacaagaaaatgccaataaacctgcccggtcttcctcttgagctgttgctcatgatatccgagcactgtcgacattgcctgtctcgcgttatgcagcgaccaattgttttttttgcttgggatctgcatgtcagtcacagcctgccaaagggccgcactgggtgccctgaggatgggcggcgtatcgattttctgacacgctttgcccgtgacttgccacagtattatctctgccacgcttgcctacgactccatatttggcaaaatgtggctctaccaggtcccaaattcaaagtcccagcctgcgtagagtccctcgatcgaaaggtacatcgcctcaaattgcctctttacgttatgcattacccaagccacgcgtactacaaattccattgtgttcatcttcaactttccatgcgaaggttttaccgtggagctcaatttggaatacccgttccgtcattgctctatacagaggctgggactaatcctatcacgaaaaaagcactgaaactcaccaaaccgtacgacgaagagaaatttcaatgtagtcatatgacaactttactgtctattgatgttcgaatctgctcgaaccctccgagcctttacttacgaacgcaagagcttgcggtagtaagacgacaatacctatcattgttatttccagatcctaaaaacgagtttatgcacgtctgtatgcatattaaccgtggctttaaattaatctctgtcgttcacagacttactaataaatatagctatgacccgacaacaaaaccccgagatcaagggcgttgtgataaaagcaatgcctcatggcaaatcgagatacggagtatgggacagaaagaagtgtgccttgtgttcacccggtggctcgacttaggaccaggactaagcccagacgatgatcggtggaggtgtcacaatgaccacgaattcgaagtcaacttggcagaacatgaaaaggttgatccctgacagcaatttgaaaatgactccacacaggccaattgctcggatgcgctctcaagaggaggaaatgtattatcgtaacatccgatttattcaaaatcagacatatcgaagcttgatgactcgctttggggtatccgactggtgcttatacgtagaacaatagcgaaatcgctcttcttgctgtgttgttagttggaatagcccaatgcattggtacttgaaggatataactgggggaaatcgcaggagcagaccaggttccaatcattgcaagcaattcaactcggcccatgtcgatgaggaatatttttgcttgtttgattgcatggggggtgcctgccgtttgtgacttgattgccttatcgggaaggcacctcctcctcctcatagcaatgactcgcctcctctacatttcctttttctttctttctttatttctttctatctttcttcgtcattgtcatagcttcgtttattgagacccccctgcctgcgcaattaaacaagcgaaagtacagtctatattctttatcgtcatgggccgagttaaatcgcttgcagtgattgggactttcatttacagacatactctaggtcgccatggtggacaaactccatcacattaccgacctcccattgcggaaatggtcccgcgcatcaggctacgattagacattaaattgacggtgatctgatcgtacaaaaaagaaacactaacaatttgcccgcttgcccattagccgtgtcaagtttgttaaaggagctgcaaattgctttcctttaccgaaagtcaactttgtcatggctgctaaccagttcatatattccaatggatgtagtggaacagcttacaattagatttgttctacatatggtgtgcacaaactaacagactgctttcttacaggtttcataaaaggatgatcaaacggggattccgacgggttcgtgggcgcagcgaactccacatggtggcaagggaggtcaacatcattcacgtagggaggggatcatggatgaatgggtgtggataattcaagatcagattagatgacatggcacgattgatttgattgattaatctaagttcctggagaccaaaaggatttttggtttgctcaaggaattcctcggtcacagccaatataaagtttttgctctcgcacgcgaccgttgaagggtgtgggcaagaaacatgatccgtacagagtactgataataacaaatagtattccatacgaagtagagtagtaccgcgaggcgcctcgaacgcttcgagacaatgcgatctagccccgagacccatcccgcatgtagaccttgcctggacagatagaagcttgggttaccatcgccataaaccccggttccgcgtatctgatcggaatcagataagtcaaaaaccagacaagagggcgtgaaagtcaaatttcgcggaggacccgaagaagatctcgttccacaatgctcaattgagttcatatggcgacttcaaaggccccgagaagatgatgattcatgcacgaggtcaataaatgcttgctgttttgggcactaattgggggctggaaacgaccttgatctttcctttgtgttaagcttctcgcgaaccttacactgtacaccgcgtggaaacgcaagggaccgggtagcctttcctagagggcagtaaggggaaaaaggaacatagtgagacagatgatggcatgactcgaataaaacggtcttcgtgatatccggccagcccttcaagtggtttggcgtaagtggtggacgcaaacgggatggccgcatcaagcaggtagcagccctgaaaagagactttgggcggggaagcgctagtccagaataggagggagactcgaatctcggccaatcggggctgcggcccccacaccatctaggggcttattggggatgatcgccgtcacggcagcccctgattgggcccaatatcagatcaactggaccctgtccgctcaccccgagattatctgatcgtcgcatcggagcctccgttcgagaccgaggaggggaaaaaaatggagatgtcttggacgactgcgggactttctggtctggaagctctcgggcctctgttcgtccgaattaatagaaaaaagaacccctctagcgtcgcagatctttcctttctccttcccatcctcccattccgcccaatactcaatccttgtatatcctcacacagtcccggaagcacctggggatctggcatccggtttgatttcctgatcggacgaaagggatacacagtaatgggtctccccgcgaccgctgaaggtnnnnnnnnnnnnnnnnnnnnnnnnnnnnnnnnnnnnnnnnnnnnnnnnnnnnnnnnnnnnnnnnnnnnnnnnnnnnnnnnnnnnnnnnnnnnnnnnnnnnnnnnnnnnnnnnnnnnnnnnnnnnnnnnnnnnnnnnnnnnnnnnnnnnnnnnnnnnnnnnnnnnnnnnnnnaagggccccccccgcgcccgctgaaggtcgggatgacggcaaaattatcgaccgaactataatcggggaggaatcacacagctcgcaaaatgagaaatcggagacacgcgaggacaatggcgacgggtcatcatatgatcctgaatcacctcccagattggacggctcccatgggggcgacatgctcgacgatgagaaggaattggaactgcaccccgacatgatcacggagggtgccgagttaggtcagcagaaggcggaagcagcagcgctcgcatggagctggccagctttggttggaatatatgcttggtgagtagatcgtggctcattcgttccggcgctcttgcgatgaaaccaattttctgacaatgaccgaacttgcaggatctggatctgcacatttatgttggcgttccactcgaatataagcggcttcctaatcaactacattcagggagggttcaagtccgcaccgcaggtctcaacatcctatatcctcgcgaatatcgtgggcggcgttcttaagctgccgcttggtaagaccttgaacttgtggggtcgtgctgaggctctggtggtctcgaccagcatttaccttcttggtatgatcatcctcactgcatgcaatggtcccaatggatatgctgccggctacgtgctgtattggattggttactactgcctatacctgatcttgaatgttttcgtcgccgatacctcgggtctaaagaaccgagcgttcgccttcggctttatgcagactccatttatctgtactgcattcacgggcagcattgcagcaaactcgatatacgccaatttcgggtggcgctggggttatggcatcttctgcatcgtgatgccgtttgtgttcttgcccctcgccatggctttcaagtactttgagaaaaaggcacagaaaaacggcatcttccgacgacagcccagtggtcgcacggttggacagtctatcattcactatatccatgaatttgatggtaaggatactcaaaccaaagctcgggatattcacactaacattctattactagtcattggcgctttcttgctaatgagtggttgggtaatgttcctcctgtcattcagtttggcgcaatatggccgctctacgtatgcgagcgcaaagtttattgctctcatcatcgtcggtgtcttcatgctgttcgtctttgcagcatgggagaaatggggcgcacgaacccactttatccgctacgagttgatcaagcggccgaccattctaggcgcatgtatactggctgccgtgctgtttttcagtttcgaactctgggatcagtacttctacaactacgtcttgatatcctacgatatttccgcagtccatgcaaattatatgatccagatttacaacgtcggctcttgcttcttctctcccgtcatcggagctataatctgggccactgcacgcttcaaatacatctgcctgttcttcggagccccgctcatgatcctcggctccggcctgatgatttacttccgtggcgcagaccacggcattggctacgttgttatgtgtcagatattcatcgccttcgccggcggcaccctcgtcattggcgaagacatggctgttatggcggcaggtggccgcgagggaactccgatgatgctggccctcatcggattgttctcgaatatcggcggcgcgattggcctggctgttggtgccgctatatacaacaatgtctttgtcaataccctcgcgaaacacttgcccgacgacttgaagtctaatgctaccgagatctacttgaatggtatcactgtgcagtcaacctacccatggggaacccctcttcgcgaagctgtcgcctatacgtggggctatgcccagcgtctgaattgcattgcttctactgccgtcttggctttgaccattccttgcattctggtctggaagaactacgacgttaacctgaagcagaacaagggtaagatgatcttctagaagggtttccgttgcacgggtgtctatgtattgtttatgtattgtttatgtgttcttttggtgcgcttaattctctgccgcgcagagagagggccgctactttcatttgtaaatttattataattatctcgttgagcgtggatgatgtgaatgtctatattggcaccaaggtgattggtcattttgcaattattagaaccaaagaatttttttcttcgtttcgcctgcctctatggcccatgtacacatattctaaccatgctgaatcacatcctttagtactggaattaattaccaaaatgaggcgacggcaagaagaccgcggtggggttgaccgcaacccgcgattggttcaagactcatacatccaaaggtcgactttaatttcacctctcttccttctaaccattggcatcaccctcaaggtgagatattgaattaccttcaccatgcctccatccgcggcaatgaatttacgcaattcctttggcgatcggaagatccccgatatctcgcgcaagattacggcatgtgtcttgtgtcgcaaactcaaggtgaggactacacggttctaaaaagagagctatatactaataccgatgcagataaaatgccatatgactgataataagcccccttgcagccgctgtaaagggcgtgggcttgcgtgttctgtcaataagagcctccaaatgctcttggagaatgatgcttcgcatgttgtccccatagcccgtggtttcacttataactctggctgatacataggtttagatggaaggaacagatggaagatcgaatgagcaagctagaacagtctatcgaacaaaacacaactcagccttctgcggttgcctcgggcaatgccgctctgccgcagccacttagtttcaacagcgtcgaaactgacattcccggcggtttatctaattccctacctctggagacacctgaaactgtcactttaaatctatcatgcagtcttggcgcatttccagcatcgtctatcatcaatcttacgctgggtaacattggagcagccccaggacgaaaccccgacccagtttcatgcggatatatctcacaggagatagcagaggaactcttcgtattcttcaagcaaaacttggacccttgcattcacaataccctcggcgagaacgactctttcagtaccatccgtacacgctctccgctcttcatcactgcaatatgcacagtgtctgccttttgcactggctccgataaatacagtcccttactaaaacatttcacaacccaagtctccgcgaagttattttcgtgcaatcatacattcgacgacgtccgcgcgctgtgtattggagctttatggttgaatgaagtttccaccgcgctgaacagtttaggtgagcgacagtgacactaatggtctcagatcttgcctgtcagtatactaacaattattcagctgttcgcatttccacagagttggatttgcacaggtgcatcacaaaaatgcctcacacaaaacgagcctgctatgaccgtacccggttatactggctggtatacctctgcgatcatcactgctctctcatccacggaagacctccccttacgcgagacttcttttcattaagaaggccacgagattttctgcaaagctatttcaccaacgcttctgacttaagtctaatcagccaggtcgagctgtggtctatcagcagtcgtgtctttgacatgttcggtgctgatattgagtacagtgccgctagtcagcggtcgaataagctgacgcagctgagtgctgcctacgatatatggctggaggaatggcttgccatgctttccttcacgaacgcaccgagcacattttcacgccgtgtcttcgatctttatttccattccgcgaaattgtatctcttctcgcatatttttcgaggctcgtcgcaggatacaaaactctccaactctgggtccgaatctgataccgacgcggacaagtttgcacacggcgcggcgagatgtgctctggcaattatcaggtgcattgtggatgacaataaatcatcctcgtggctgggaaaattaccaacctatatcgggactatggtggcatttgcctgtgtctgcttggtaaagatatccgtcgagcaaagaccgtgggctcaggaccttcaagccgagggtattcccagttaccttcagcgactagttcaggtcctcctctcgtcgccggttgtcaaccaccctacacatcctctactgagcattgccaggagtctggagactgccactgctgtcgctgggggtgtatatggccaagactctctagcctcaatcgatatgcgagatttggaccttgatctgggattttttgatatgtttaccagcgatacgttgaatgggtgtactgataaccacggtgcatttccagggatgtgagctcaacactcaaggccgcttcataatctttttttctttttctttttctttgcctttcgacaacttccggggcagcagcatatacctcctagaggacgcggagagtctcggagtcgccatgcacggctgcaacaaagaagacatcctgggggtcgcactctgtagctttctagtagcctcttgcgacggcaggattagttagttacagcttatacttaattttacccttggctgaggatagtttttgccctaaacaaaatgtcggcagcgatctaaggtggtctatttcatgtattctcagtagaatcctgaaaagtgcagcgaatgaatttcacactaaaagctataagggcacattagtagcattaacataaagagcaacctgggacagaataagaatatcaacgagaataagaagcattttcaaagcaccgtccatcctctgtcaatcaaatcatccaggtagggtgacaaggcccaggcagagccttctgccccaagctgaaagaacccaacgatacttccatcttcgttgtcatctacaacgatgggcgcgccacaaactccttcccggatcgaactagtagtgggcccatagagacggtaaatattctccgtaatgaactcagtgaacgggaccacgataccgggaggtcgtggtggacttcgatccttaactccagccaccccgagaaacactgctccgcttgccataccgtctgcacaacaccatgtattattttggacttcagtggaacggatgaggcgattcggaggctgggcttgggaaatattccccatttgtgaatgttgtcgacgggtaaagtttcaccaaagcgacgtcaagggcatcgaaccgttcgtcaatgtgaccaatgcaaacgcccccattctgagaggacggatgatagacctcatcagagttgataaatccgtgattggagacagtaagtctgatatatcctgaatcggtgtttctaagtttcacgccggcagttgaagccatggtggcatcgaggtaaccactgtctctgttagtaaggccacactccactcgcacttctgggcagagagtttggaggtcagtcaggaaatagttagtcgtatcctgaaccgttccaggtgtgatacagcgttctctgctttggcacgtcagaggccaaaacggcgtatgactgtggtggtatacagtgaggagaccaccgactcttcctgggagagatcgggtgctgtatgatcttccatcaagcgcgatctcaacaatgatgataggagcaatgtaattgacagcctgcactgtcacaagcctacccagggcccgtagaaccgcttcccgttgcttttcggatggtctctcccacttcggtagttgaaaatgcggagagaggggatcaggtagcctcgggttgctgtaatcggtgttcgttgtcaagtagggccagttggatccggcagggataaacgttgctgcaacacatgccacagtcaaagggattggatttgggggaaaacgggtttcaatgatgatgtctggccagctgtaggtcacactttccgcgcggaaggcatcgacaatccacttcctttcttcaggtgtaggaaagcggaaatcgtgtacatgatcatcccagagagagaacggggctggatcagaagcatttcgggcgccgtatccattgttagttacccaagtaaaaaacttgggctggtgggaagcggtgggttgttctggaggagcggtactttcagggtgggaatgcaacagcgtttcgtaagtctgttgccttgatccaaatgcgacatatggcatttggaagcgcagcgtttccaccgcagatagtcgttgctgcataccgtcccgataggctatgtggcctcggctatcgatctgaacacgggctcagacagacaggtatttgtgttgacacacttggggaaaaggcagtgatgtgacgttcagccggactctgagtacaggatgtagcagatgatgttgtctgagataaagtgaactaagtaacctaatttcaaagggaagtgacgatttcaaacggaagtgacggaaggatctatactctgccaggtacggcagccttatctccccgctagttacggagtagttagctaacttatcgcgctagcatgttgactaagcacggtcgcccctttgggtttagtgggtgcactctgaatattcttcttcgggaccgccatcgtagaccaatctcgaaagaatcggattgttattaggacaaggttgtattgcattttcgtatctcttacctagccctgtgtggtaagatttagtcttgttttctctcgcatattcaaagattgaattcaaagttagagtagaccagtgaacacgcttaaacccttccacgtattgcactggaatttttttcgttgatttctatttcgtacctagatcaaacggtctaccgtggctattctgtcagacaatatatgtatagcatcgggtttagtatggtctggggtgtatacctagggtcccgcgggaccatccgccgtgttcccgcggtccacggctcgacggttagattatgtaatccacaatgaaggtcccggggccgccaggccactgtgagccaatcacgcaagtgtcatgtgcagatcccccagaaagtaccgaggtcgggggcgcgggtctcgtttgtccgagataggaattgggagggctcttgcatttttcttggtttctttgttaataccagatccgattctgaatggcaaccatcaatgccatcgcgtcggagtcacacgaaatccaggaaagggtgtttggagtgtaaaaggagacatgtcaaggtgagtgacaattttactcccctgaacccgtcggtggatgtggttcgggaatgtgcctgaatcgtggctcaaatagcctttacggacggcggtgatccaccagccgagacccaattctgacggaaaggccagtgtgacgagggcatcccaacatgtactctgtgcaggaagcgaaagatggagtgcagatatcctcctccaaatgaagacgaggacagccctatggaatcatctagtgcccaggaagaaacagagagtggcactgtgaccctaccaagggattccacacaagcaacacgcttgcttgagacgagattattccaccagtatatgacttcaacgtaccatacgctgtcgcaggatggactgtcaggacaccatctctccatgaccattcctcgcatggccgcatcttgcccttacctgcttgacagcatccacgcattctcagccttacacttggcctcggttgaaactgataatcgagctttatggctgaatcatgccgtgcgatatcagagccaggcatgcgctggactaagtaaggttcttccagaaatctcaccaccagattatgaaccagcatttgtctcgtccatcatcataatgctatttgccatgggatctcgagtactgtctcttgaaaatcgaacactggacccgcttttggttgttctcgaggctcgtacattgatgtccggccccgccatgcttttttcccggatacttgaaggcggggttgacgcacagctggatggatggctgtgcactcctgacacaccagaaagcctcgaaactgggaaacatgatcagtatggacctcctgctctctggctcatcggcgaaaggttgaataataacatgaaacagtggcggcaacccagtcgagaacacacatgtattatttagcctgcacacgtatgttccagcgatgtatagagtgacggtgtagggcttgcgaagctgataatagaggcagggatttaatgatgtcgttagttcgacttcgtgcgatgattgacacaagggaaggatcggatcaaccgatctactatggcacatggcagcagttgcatcgggccatcgagccgtggccaaaaattggaccgcatggtggcccccttgcatggcccttattcctctccgacaaattttcctcgctgctccaacatggcgattggattgcccgagttctgtttctgcattatggtatagctatgcgtctcctgcgccatcgatggtacgtgcgcgactggggtcgtcggctagtattggccacactggaaacactggacaaaatccctcaggagtgggaggagaccatgtcgtggataagacgagccgctgcaagggaggattagtcacaaggatgataaccagatcattcggggttaaatattgacaacaaaggaaagtccaactgatcaccgaatcatatccacggaagcaagaggttacatttagacgatttggagcatggaatttgacccaatgactccgaaaaacccccgcgctttgacaatttgggccctgaagctacccggtggcttatcggcggggtcgaagcttcgggggttttacacttaacacaccgctacgcagtaggtagatttaatggtattggaagacacgcaccgtcaagatatctgatccttgattcctatccttcaatccctcgtccctcgatgccagttgcattttctgagcaacctagagcccgccgatcctgaaccaaagcgtccgaagcgaagctggacgttctccaatcgtgacatgcaacacccctgtcgaactagccaagatgtggagaaacaggtacagctatctctccaaggttcccctctcggttattgtttttgcccgattgaaaatattaatattggatggcgtcttagcttgagttggccctgccagcatcttcttcccctgtaccgactcttgggcattgcgtaccgcagagaaattggaggcagactctagtcaacatgctacaaccgatcagattaggcgttttagcgattctatcgctgctgttgatcgcaattcatctacccactgccaacaccttccccttggagttctccgagcgagacacgaatgctggccacgggtcgcacggtaagattggtcctggaaagctgggcgctgttgctagcgaaagctcaatctgctcgcgccatggatctgatattctggagaagggcggaaacgctgctgacgctgtgagtatctctatctgggttcgttcgcgataagggtgaacctcggtactaataatgacatagttggtcgcgacacaattttgtattggtgtcgtaggtgaggctacatcaatccgctcagtagtcgtatctgagcattgctaacggatacagggatgtaccacagtggaatcggtggaggtggctttatgctcgtgagatcagcaaagggtgattacgagtttattgatttccgagagacggccccagctgcagcattcgaagatatgtacaaaggcaacgaggatgcttcaatatacggcggactagcaaggtaagacaagtacgcgcagcagatcggaaccaggctaacaatactagtggagtaccgggcgaagtgcgaggtctcgagcacctccataagaaatacggctctctcccatggtcgactgttgtgcaacccgctatccacacagcccggcacgggttccctgtcacagaagatcttgtcaaatacatggcatctgctgttggcactggagaggacttcctgaccaagaaccccacatgggcaattgactttgctccgaatggaactagacttgggttaggcgatacaattacccgacgacggtatgcggatactctcgagactatcgcgcagcgtggcgcggatgcactctactcgggccccatcgcggagactatgatcaatgctctacagagcgagaatgggacaatgacgctcgaagaccttaaaaattacactgtcgccattcgggatatctctcagattaactaccgtggctacaagatcacgagtacgtcggccccctcgagtggtagtatcgccatgagtattttgaagatcctgggtacatacaaagatttcttcacgactgaacaatctgtgaatttgagtacccaccgattggacgaggcgatgcgatttggatatggcgaggtatgaatgcctaactctgatttcacgggtggactctgctcaatggtcgcttacatgaactacagagatctaactttggtgatcccctgtttgttgacgggatggccaagtatgagaaggagattttggaacagtctacaattgacgacattcgatctaaaatctcagatgtgcgaactcagaacgtatctgtttatgatccagccggactggaaagcctggacacgtaagtcctgcttggtgcatcattctttcatataaagctaattctatatcagccctggaacttcccatatcgcagtagccgaccacactggccttgcaatctccgtaatcaccacaatcaacctactatttggtagccatatcatggtgccagaaaccggtatcatcatgaacaacgagatgaacggtatgtccatgaagccaactctaggtcacgggattaactaaagatctcacagacttctccattcctggatcatcgaactcattcggatacatcccctctgtatctaactatgttcgccctggaaaacgccccctttcctctatcacgcccgcgatagttgagcgacccaatggcaagctattcctgattgcgggatccgccggaggcagccgtatcatcaccgcgaccgtccagaacattatccattccattgatcagggactctctgccgccaaagcgttggccaaaccccgtctacatgatcagctgattccgaaccaggtcagcttcgaatacacttatgataatgcaacggtcgcctccatgaaggcacgcggtcataatgttacttgggttgctccggggcagagtactgcccagctgattcgggtcttgcctaatggaacattcgatgctgctggtgagccaagacaactcaactccgctgggtattctgtataaaatgggatatattgtgtagatgccgaagtacatacattgtcaagtgcgcatcaatatagaagacatcgcatcgctatgaatagatagaccggtctagcaagttcaagtctttcgcaatgcatccctttgttgtatattgcagatccctgctagagtgacgtttctttatcgggtggtccgtgctttcgatattcctttttctgatgtaaagagctctaattcacttgaccttgtcttctccattagaagtctacgctgacgtgaaaagtcgacatacatttgtctttttcttgagtttcatatactagtttcattgacacgagatcgcgtcgccgtaccaaatttacacgtgaattgtcctgcgttcaagggagctagccttcgtcgtgatctccccgagaagagcacgcatttgactgcacagaagacttgcaggtagctttttctactccttgattgtcgttgagtttgcattaatcagactactttttatctgaacagttcgacgtaaaacaacccaccgcgttatgtctacgaacccttctcacttccccaacttccgaccctagacaatggctcgactcagcaatatctccgtcgtcgttcctcttccatcctttgacatcaatcccctgaagaaatttgatgaaaacttctttgatcgtgctattgacgacatcttgtctgaggaagcgagcattgaaggatcccgagacgagatgatggacggcgacattgacatctcgagccccttcgggtatgatggcacgtcggactcctcaaagcccaaatttcgtcgaagccaaagggtcgaagacaggttgtcgcaattttctacaccgtcgacctcctcgcctgcaactagcaaggcacagaaaccgacgccgagaaaatcctcgagaaaaacgaagcatatgacaatggaagataacaatagtaatgatgaagctcccgtgaatcccgaaaacgttacacgacctcagcacgaaaatgaagtcataaaagttcagtcctgtcccatccacgaggccggtgatcacccttctacacttcccggaatcactgagtctcccgcaatgccgattgatgacagtgaaaggacgatcgaagacacgatattcgattcagtgggtctagaaaagcggattgaggtattgaagttcatcgcatcacgtcctttcatgataaaaccggttcaaccggttcgtcgttcggacagacgaaaattcaatagccaactgcgcagtgtcgctgcagaggctggactgggcgacacagctatcgatgctttgattgagcacgttcgaggtgtttaccttgaggagcttggaattgtggcagcaaaatatgccggctctgcatttggggatgaagtggacggcgaggaagacacatacaccgagcgctcgcaccgaaaacggcgtaaaagcagctccggtcacaccgaggacgatgagcgtaagaaaaacaagaggcgtcactcggatccggcaaaaccgcacatccacgatgctctgcagcatgatgagccaaccaaggtagtgaaatcgttcgaggcagatgctctagaaagtgtccctactgaaatccaggacaagggttatgttgagctggatgaactgaaacataagaacaacacaccggatctacccaaaatgcccacgaacttcgttctgggtagccccagttcacctatcgacttaaccgacgactcttcgccctatggcaagtttgtctctcaattcaaggatgttttgcttcaaaaggaacgtgttgatgacatcggggagttcaaagatcttgacaagagcaacgaagaaactcttacacgtcgcttgtcacttgacgcccggaaagaggatattcatgagaaccgatcgcctgaaaaagtggtcgaaataaagccgtcgaagcgtcgtgagtcaagcaaagaatcaaagatagaaagaaaccgacgcaagcgcgaacggagaaagtcgcgcaacaaacattacatgaaaggtgactccgctggtggagcagagaagcagcttgaaggccattccgccgatggggcatataaagaccgaattccgccttccactccgccgcaaacctcttctgagaattttaatggaagtaatgcaagcaaacgaagctccagtcagcccccgctacccgccgatccaaatctgtgggatgaggatttttgagtgccagtgatttgccaggtatgactccaagtgatgaggtccagtctaagtatttcttaagagccgacaactccagagttggctcgaaacgtaagcgggaaacggcttcctcgctgtacaatttgtctatcccccctcaaacccgaaagctgttgaaagatttgaatctgccctcggacttcttgtcgtcggattcttccttgagtgatgcaccgagtgattttgattttgattctgattgggatgatctagatggtcatccgttgcatattcatatcaatatatccccccctaaaagcccatgtcttgtcccccaatgtacaaaccctgagcctaaaactccggtgaaatgcacctctctcgttaatccagaacgcgttaaaacccctcaagccaaagccccgaagcattctccttatttcccacctgtgctagttaattccgaatcttgcctcccgtttccccctatcgatgggtcttctttcggactcatccaggaacagcttgcacacgacccctttcgtttactcattgcaaccatttttctcaatcgaacccgcggtggtgttgccctaccggtcttgttcaaggtttttgaacgatatcctacgatcgaggcaatggcagaagcagactcaccagaactcgtctcgatgataaactgtttggggtttcaaaaccagcgtgcaaggaaatgcattacattggcacaaacatggctatcagaccccccggacaaaagaagaagatatcgcaagctccactatccacgaaaactggacggtcgaaatgttggtcgtgaagaatgcattgatgaagatgatttgcgagtcgcatgggagattgcacatctacccggagttggagcatattcccttgatagctggaggattttctgtcgcgatgagttgcgggggaaagcctccgattggaaagggacggatgcgacagaggtcgggtttgtgcctgaatggaaatgcgttctaccacaggacaaggagctacgtgcctatcttacatggatgtggttgaaggaaggatggatttgggattacaacacgggtgacttgacactcgcgagcgacaagatgatgagagctgcgcagaatggaggggtcgctcatgaagaagaggggagttgggtactagagacatcccctgtcaaggcagtaaatggattgcatgaatcggattgatatcctgaataccaaaagtttcaaatccactgatgaagttacctgtatatgttgccttaggcagtagaatctgtgttcccccagacaggtttcagctgagagggcgtttgtatatatctcatcggatttcaggcttccatgcagcaaaaaccacgtcagttgaaagagcggggccgagatcgttcaccgcataatcgcatagtgcgtttctttccacttccaacaatttcatgcgtcgtacctgaatgaggttattcgtttctttttttcaacttgagatcacattttcttcccccagaccccagacactcggaatgccggattggttcccgcacattgcgaccctaagcgacaagtcacgacggcagcccgaactaagcgccaggagaattggagacaaaaataggatcacattccgctcagtggcagtgcgactctagacaggtaacggacgattgacccttcgcgcggtccacaactcgattttacggatttcgccatgtttcctgttagactaaaccgcgacgataggaagtcgaagaccatcaagggcacgaagagcaagacaaacaagacaaacaggaagacctcaaccaaggaccccgaggatcctcccacggctcgctcatcaacttcccaacgcaggtcctccatgcctggactcgagaagtcggaggcagcctcgttccttgagtcgagaactagtctaccgtatcctaccttctcgaaggcccacagcaaggaaggcgtccgagcgagtattcctaccccggacccgaccgacttgacacatgacgaggggaagaacggtcaccgcgaggatcaccatgcgcctcctagtccgcccctgactggtctcgaccaagagtcgaggaagggcagtattgggaaaggcagtattatcaacgaggatgagaaggagacagacaaacccaagaagagaacaagtatcaaaatcagagcctccgaagtcaacaggtcctcatcgagtctccggtcgaaaccagatgataccaccaagtccaagtccagcaagacgtcacgaacggagacccctacaaaacacagaacgtccaaggatgagggtgaagctttgcctcgatcatcgagttacaagtctaagacgaaggtttccgatgacagaacgctgcccaaacgatcgagtcgctcgacaatgtctgcctcacagtcgaacgtcacacttcgtgataacggtggagagtcagtcaacgggtctgatgcaacgtctattgcccctaatcagcagcattcggcgccacgaaaacccatgaccccgcccgcgaagcctccctctcgcacgcagaaccgatcggccatgtcccgtcgtcgcactgctagcgacgagtcgatcgattttgtgaaaccagtgaatccaaattcgttcggcgcacccccgccgcccccacctccacctgaaatgcctgctactatccctcgagtcgattatttgctgaaaaatggtggtctggaaaacaaggtctcgagggcactgctggctagcctcgggcaaaatgatccattttcacaaggacaacctcagtcccaggctaacgccggcaaaatctttgatccatatcaccgtttactagacgactaccaaaaggtcatgagtaagaatggatctctggccgtggcaacaggctatcggtctgtcgcccggcgtttattggatcgcctcgaagccgtgttcgcgcgcgacatctcttcggagccatgtagctgtcagatatgcgatcgaacggaggcagacggtcgacctgatggggtgagctggggcgaggttttggagctcgtgtctggccgcagggaacttcctatgtggcctcccttcacgatggcaccaaccaccgtagataccggcgtgccaggcgatgagcatattccaatgcagaagcttgacgttgacgttcctgaggaataccgggaccacttcatacggcaatctcgaaagacgaaggtcgctgtcgacaaatggctttatgagcagaaagatccaggcaccagtgctcccaacgaggtcgacgacgaaacgttgaccttcgccatgcttacgcatctcgaaccccgccagcggtcgttgttatgctctttgctcggcatcaattcctctactcctgtcccgcggtctgacgatgagatgccccggcacaagccttcggcgcttatctcatcggcctcggccatccagcgtctttaccgactaccctccctccctcgcgatccagaaactgctatgtacatgttgaataaccctacactccaccatgtcctcgccaccctttccgccatcagcgatgacgagtgggaaattctcatctccggccgcttcgacggattcctccgcagcggcgcagaagacccaggccccaccaccggcgctcgctggagcggaagtcgctccaacacacccttaggcggcagtgtctcccgaggaccgacacccaactatatggacggcagcttccgaccctcaagccaagttaacggcgcaccctcatcccccgcctcgttcggcgggccgattgctctagacgaggaaaccgaaatcgccgccttagcagaagtcgagcgcgacattttcctcggaatggaagcccttgaagatgctttcgaagccctccactgcaaagctgaagtcgttcgacgtgcattgcgcgaacgcggcgccggcctctccgtggcaagccaaagccgccggggttccttcgtcgaagcgcgcctaggcacacccttctcgggtgtcggaacgtgggaaagcggtggtgaagacgacttcctcgacgacgagtgctctcttgcgcccgatgactcggctagtaatatcagctcgaaccggcgtcgtcggcctaagagacgcacggagcgacgcacgcctgcgcctgtcgaggaggaagacgaggaagatgatggtcttggccgtcgagatacgcgtccctcgaggcgtagatagatcggcacctggatttgaatgggaataattcttttcgatctacggagtacgtacagcgttggaattatccgaggactgtttgctggatagcattggatatggatgtaactgttgctgttgcaatgggcttgatgaactcatgataccccctcctactttcttgtcctggcttttcttcttcgtttctcgcttgttcttttgcttaactccacgcttggcctcctgctactttttatattttgctcttttgatgatttatgaatactacgagcttccctccccctaacgactagccatgcctttaggctatgatacaagtttgattgagcatatcccagcggttgagttgttagtactgtgcaatacaagtgaattggatctaggtattgaaatgatccctcgggacggactagataattaattccaacaaatagtagaaaggctcagtatcaacccccaacatttgacgcaatttatgtcttgtcgatcaacacacaccgccatctactccagctgccgcaaaggaagccggagaacacccccggcggcaacaggagccgagccgcaccgcgtcgtggaaaaaagtacgatgtacgaatcgcaagccgtcatcgggtatatcttacgacatcatccctgttgggtggatcaaatgaaccaatctcgacacggccaacggtttgtgatgcggacggccccaaaccagccgctccagccgcactgacaagcgtatgctaaatgacgcaaagaacaccatttgcggagtgcactgcaaagtattgatcaccggagtctcagggtatgatctgggtgatcctcggaagaagaaactagttgtgctaaagatcgataggctaagatcataagttaactaaaataggaaaacgggcccgtcaatcgaagcttcaattatgataggctgtgtgttatgtgtacacggctgaggatggagcgctctataagcggactatttaatatttgattaatgatgtcttaggcacattttggttaaattgcatgatgtatttgatcaatagatatctaaaaatgcaaaggagccccgagtgaagatgtatgctttaaggtcaaagagtggggattcggcaattggatagtcgatttagtgcttacaacataggggcatgcagtctgaaactgagctagttggatttctggaaggttaaggttctgaaaagaaaaggatgagttggaaaaggttgctggggatttaccccaaattcatcgccggcacccaatataaattcggctgttcccgattacccctgacgggatatctgagacatttccaaattgaggcattcttttgcgtaagcaccagtttgacgatttactccgttgatctcctccactagtccgtgctagccagctggaatcataccggacataaggagcctcctttatccagcttctcggaacactcgtgtctgtcccgtctactccacttgacagacgatgttcgtggtcggagcggatcgaagcttagcccggcttacggcagtgtctaactagtgtgctatatcggattttcctgtctatagtacggatctatttataagaaaggggattgtatctctataaggctgcatactttctatttgtaaaggtatatatatcagaagggggttaggcataaaaaagaggaaatataaatttgtagagaacgaaataattattactccgtagttaaagactgccgtaacctggtccaatcacatagccaagaggtcaagtgaccccaaatgccctaaatacataatccttttgttaaacaacacgggctattgcggggtggatctcacataaaattatgttcatgccggggtcctggcccactcgcccacattgtgctttgtattattttttctttgttcacttgatgtattgaatatgatatagcctaccgatcgatcttacgatcgtaaatgcctttgagcggttcagaaaagagtctgctggcggcttttatagaaagagatggcgatactttcaatatcgtagagtacaaagaatttaagatacacttgtcccaattcaccctagctagtactccagaagcctcggccccaaatggaatactacatatagggtattaaaggtccaagcccgctgtcaattacccaatatggcgctttggccttggatggattttgcgccttattagtggttctgagaatcaggggtgcgtctcctatggaacccgtttctaaacggccaatgcccttttttagtatgcacttaataccaactaagctaaactttgcggccgtttcattcgacatcccgtggcaaacttgtgtccttttacccacatgagcacgtatgccctaaataggataagtggagtacaaatacgctgtatacggggattcacagctctgggccgtgaactattatggagatcggaatccttcgtccaggtgtccatattttccactgactcgaacttgccgtggataacccagccattgaccgacaaaatggttaaaccggtttaagtctcattctcctatccttgcctaagttcaattagtcctagtagcctgggtttgtttctttctctctcattgaatctgaatttcacctttcatgtctgtcacctcttccctccacgagctattcttaatcttccactgcaggcagcgcgtggtggagatatagtatttaccaaattcaacctctcgtctattcacattcgcgtcggccttggatgtcgcctcttgttgccctggacagtgaccccaagaacgtgctttgcagcctacctttcgaccaggcaatgatagcagaatcttagaaccgaaaccatccgcaaacacattcgaccatgtcggcagtcattctcatgggcttgatacccggaaacaagcactcgttggcagctcgcttgaccacctccgctcaacttactatcgaccctctttcagaatcacatcgagaaggtctaatagcaatttcagtcttggccttcctctctctcattgcaacatcaatactcctcggtttcattacctatcgactttttttctggcgcagcagttatacacgttacatcggttacaaccagtacatcattcttatctacaatcttgttctggcggactttctacagtcacttggatttattatttctctacaatggatcttgacaaacaagattgagtctagttccgccgcatgctttcttcaagggctgtggctgcaaattggggatcccagcagtggcctgttcgtgtttgctatcgcgttccacacattccttttagtcgtctgtggacgtaaaatgtcccacaagttcttcgtctcattcgtggtcggcatttgggcatttgttgttttaatgttaatcatcccattagcacaacacggtcctggtatctttgtgctttccggggcctggtgctggatcagcgatgactacgaaatcgcgcggttatggactcactacgtctggattttcctcgccgagttcggcacaatcattctctacgctgtgatgtatttccagctgcgccgacagatttccgcctccgctatcctcgacaacagccagctggagagtctcaagcgcctacgccgcgtcgtgggctacatgaccatctacccaatcatctacctcgttctatcgctacccatcgccgcaagccgcatggccacaagccacggcgatacacccaacattgtattcttctgctgttctggggccatcatcaccagctccgggctggtcgacgtcatcctgtacactctcacccgccgcaacttgatcatcgactcggaacccagcgaagaccgctcctatcacaattacaacggcagcaaaggcaaacgaggtgggaacaacctaactaccgttacggctgatcccaagcacacagtcggcggcacttacattgatgagattgaccgcaacggctcgacggataacatcgtttcacccaccgcacatggctaccacgcccgtgatcaggaaatgatgccgatcggacaggtctaccaagaaaccaccattgtaatcacacacgagcctgcttatcccaccgaggaatccagtaagcgctctagcaaggagaacttccccgaccgtccatctcaatcaggatggcggggatgaacctttcttcacttctattcctatatccattttgtgatatgatgccctcaatacccatttcctgtcactaccacaaatattcgttccctcaagctgttttcactaccgcttcatgtctctctttatctccctcgtcttcctctgttttcttcctcttcctatgtctgtatactctcatcctaatccttttttatgacgaaaccttgtatgtatattttgaaaagggacagaacgtgttcgtccccacgtgaaccatggcgattcgcatgtgatagttaattatttcgaatctgaaggctcgtgatttggttttgattgaaagaatatccacataatttaaatcatcatcaagagccattccatcgtgactgaaaatggtatcccaaaacgctaatgagtttcagcagtcgaaggatattcccatcaagaaagctttttacagaaatatacacgttcgaacccatcctccattctgcgatctgtttccataaaccctagtttcgcgtaaaacccaatattctcaaacatcttcacattagtgaataatgttacactgggaagcctctgattttgagcttccgcttccgcgtggttgatcatatagtatccgtagcctcgcccttgcgctgttggatcgactactacgttgtcgattttgagcgagtttgtctgctcgtcctggtggcaggtgatcgaccccacgatccgctcattatctctcagaacgagaacttcatacgtttggagcacatggtcccagtcttctgtcatcggtgctggtggtttgccaatgcgttcaatgtatttcgaataggcggcatcaaccatctctttgatggctggtatgtcttcgactattgctttgtgaagtgcgagcttgctgtccgatggggaccttgggctgagagttatggtcatgatgagaaaatacagagtgaacagtttaaaaatactttatttgggagtttcgcgaggagaatagtcacaacatattttcccttgagttgtgagtcagaactaccccgccaagcgacaactttattgcactctttactcaagccagacatgattctcagaataaatccaatttgacggagctaagctaagaccttcaattcgacatgtatacttcgaagaaacatgatgtatcacaattgacaatcacgcagggggaagtgcaagcttcccagacgaccaacgcccctgagtccatacatactctgtaatcgccgaaatctcatgaccagcctggaaatacacccgaacctccggacgcgggccattcatccagctgatgcaatcaatctgcgttcccgggatacagtccgcgtggaagtgtccctcggtccaggacttgccgtcgtacaccatctcacacatcgtattcgaagtattgtaaaagacccgaattccgacggtttccgagctggtcatatgactagtgcaagctatagacgtccgaggttggacttttgggagcttggcgcctccaccataccagccgcgtttgctgtcgtagcacttctcgatgatgccatgctccatatgctggaaatacacactatcaatagctttagtactatcccgtgaaagaaatcccgaaagtagcaattaccggatatttggttcagaagtcttaaacacggtgcacgttatgtctgtgccgggcattgctgagcccaggttcgacattgtctcccagtttccattatctattccgctgtgagcagcggtatagcaataatgggttgatgacttacctttcagtccgtattcctgaatcgtgttgtttgccatctgacaatagaccctgttggtcacgtcgggtccattgaggtgacaagcggccagctttgaacacggtgctgtaataaaacactttttaccaagactaccttcataccaccctttagatttgtcataagtaacatcattgatagtgttctcggtggagaggtagtagactcggatctatgcaggttttgttaattgtgctcttgatagcttttcccggagaacactgacattttcaaggtcacttgaggtgcaggctagaggcgagtagggcttggccgaagcaacgatattcttctctgttccgttgctccatttgtcatcgtacttcgactcgcggatctttcccaggacatcttgcatatagacccgtaggtcactgcctgaattacaggccgcgatggaagtccctaaagaaatgatatcagccctgatggtttaaggagagtaggatattccatacgaaagacaatctcgtgggcttcgttgctgggcataatgcgagagttattttgatgtaatgagctggagtttttcgcgctgataacaagaatatttttatttagatcggaaagatcgaagaggtttataactgcaaaaggccaacattatgttttgcatgtcacgaggtcatacaagctgcctatattgggcacgaattctggagcattggaagagctctgattgtcggaatatgcgatgctttacacatgagtagccaatattgtggcacatcacgcaaacaaggcccaagaccacgaggagctcgcggattgtcaacgcacaagggaacaaacacttgttttgaacggaatgaacctaccggaatctccggtgggtggcaaatggtttcattaattgaggctctgggcaacgttgaatatgatgccatgtgatgggcggttgattgtactacgctatgctatatatgcagtcatcaagtcaagattccccgtcgtacagttcagagtaacagctcaagaatatgcatttggcaagtattctcggcgatatttcacgaaggagagaaatttggtgttttttcccgatgatccagtcgagaagtttgacattcgtaggctcatgtaggccaactggtcgcctacgtactcatcgagctccagattttatgatttcagaaagcctctcacctgttgaatcacagcctgttcgtgattctggtgttaacgtccggtacaatgactatctctccgctatcaaaatattgctcgaactctgaacagacaggaagtttactacgaagggaaaatatgtcactttcttttccaaaaatagcatcaactgttgtttgtccgtgcataaccgaacaaatatgtagcaacaatataacggaatgatttccattggtgtattccgtattattaggcaccctccatcataacccccttccagtcactttgctcgtttttgtttttcttgcgcttgtcagcgcccgtccacgataatgtttatgctcatctttagtgtagtgaaatgccgtataaatgtggctcggaggtctctctagccctagcccaagggtcgatcatgatatgctcggcctatcatatgcctagtcagtctaagaataattgtgtagaaactcactagttggtactgggatcgtaaatattaggattgctagtagtttcactagataaataagtgagcgaaatgggctttttgaggcgccagactctcagattcttcatataattaattcgggttgtatgataaaagctcggcgtgacataggatcagttggataagtgcgcgcgatcctatcaagtcacgtgattatgtcttatcttatctacgcagcgtagataaaccatgtgatacatcacgtgcagtattttctcgccaataattgctgtgtcagattgatttctgcctccgcatccatcatctttcatcatgcgaagaatactacaacggcttatgtggttatggacctagcagtttaatgcaatggcgaactaaatccgattgaatcggatgattttgatcctatcatggcgcagatacggcggcaacatgaggcggtggattttgagattaaaaaacgatgagcagcagtccacagatattacaggccgtcaacatggatattcgatactcggctgctgggaaggacggttcaccacagcgaaggaagcactcgatctatatctacaatcatgttcggtaccggtcatttcacatcgacaacgccgtgtttttctaaggttgaccaatgagatgctgctctgcaggtcgacattgaagttatcgtactatattatctctgtatcacccgaaaccatttcgaggactggacatagaattcgatctctggacgaggcaagtagttttacatgagaaatatgccaggacacctgtcttccacggggatgacaaccttggaatggagcagctgacgttagtgcataactacatagtctgatttaaatggtatgtagcccagaaaatgcgcctcgtacagctatctcgaggctaatcgcgctcaagcggagccaacccgctgaactcgatttagcccccgatcgatccgcattgcattgcagtcaggtccaggtaaactcggtcgggtcgactgatcaaaacctcaattgattgaagtgtcacattgcaaggagtgcgccaatatcatggcttgtactccgtgcagcgcctgataaataaatactccaccccccttgatagagtggaataggaagattaccaaattgactgagatcagactagttttgctgcaaggctagttccttagattaccgtccacctgcgtacatcttcgtgtttcagtctcacaacgaggcgatcattgcagatcaggggtctagggatccactatagtggaccaggtttattttgatcgccaatcaaggcaccacagccgcaagaatgtacaacaaatatcttgttagaatatgctgtaatatgtctaagagccgggcttgaatattgaaaccgtcttatttaaagctaacatgtgttgccaattagtatctccgctcgagaaggtccgacccattcttttttttttaatatctcccaaccatgttgttctctcgcaacggtcttctggcacctttggttgtttcgctgcttctggcaggaaatactgtcgctgatgacgcaggaacgagagcccggaatgcactccaaacccttcagggctggtataacccccaaagtggcatttgggatacctgtggctggtgggatggtgccagctgcatgaatacagttgcagatttagctgcccttgacccatcggtgatggatacagcgacatatgtcttcaataatacattccacgtggggccagtgtccaatccgaatcccggacctgagcataagactgtttacactcgtgacaaccaaccacaaacttccgtcaatgctagccagtggctggatcaagcttacgacgatgatggatggtgggcccttgcatggattgcagcatacgatgtcaccaaggaggggacgtacctagaattggccgagggaatttttgagagcttggtatgtatagtgtcagattctgtgtgtacttggacatttgttgattctttctaggctgacgcatggggcaccaactgtggtggtggcggtattccttggaatcctaccagtacatacgtgaattcgattacgaatgagctatttctctctgtcgcagcacaccttgcaaaccgagtcgccgagagaaaacagtattatgtccgctgggctcagaaggaatgggactggttcacggcccaggccttcattggtccaaacggtaccatcaatgatggccttttggacaattgtcagaacaacggagatactgtgtaggcatcatgttctctgattatctttatttttggctaacctgctgcagatggtcgtacaatcaaggagttgtcctcggtggattggttgaattgaacatagcggcacccaataacacatacctgccatctgcaaacaagattgcaaatgcagccattgagacattggccgattcgaacaatatcatccatgaattctgtgagccacaatgccttccagatggcacacaattcaagggaatttttattcgcaatctacggatgttgcagaaagcatctccacatgatatttaccggaaggtaatagataactgtgcaaatagcatttggaataatgatcgcaatgaacaaggacagttcggcgtcaactgggctggtcctattgaggcagtagtggatgcatccacacacagctcggccctcgatgccctggtcgcagctgttgctgcgttgggtacctagcgatggaatccagaaccatggatatttctttttttttttttaatattttctttcggctattctttcaagtatataattcttcgttctacatatataccaaacatcagaccagctttcacggttcaattgttttattctcgctttctagtatgactgtgctcgcttggtccagtcaggctgtggggcggcctgaggtctcgtgcatcctgactgaatgacggatgtgggaactaattccaaccttcccagtgttcaccctgtctgtcctgtgaccacactgtcaagcctcgtggttgataataccccctggaatcgggaaagccgtctgggggccaacgtggttgactaaattagatagaaattagagttggtggattccggatgaagaaccatggaaccgtgtcccatgaaccaaagggtcacatactatattttccgaattgatacccgttgacgaacagctggcatctgtaattgttgcctcgagtattttgcttagttatatcctgaatcgaattgttaaacaccacgctcattgcaatatcccatccactggggatattcaacccgaaggatactgcatagatcctaacacctgcgtgcgataagccatctgtgactgggtttgaaaattcccattttgagcttggtggattaggataatggtattcttgtctctcggcatacatgtcatcttcattcaaaggaccacgagctagatcctgatactgctcttctccaaggttgcctgtcaatttccacgagacatcggattgggcgtgacccgaaatctcatagtttaaaataccccgtgggaacttgagtgaatcagtgccaggagcccctttatcttgacccatatgatcacccagcactgagttcacatattggcttccctgcgacaaaggggatgacagcgacatgctgtggacaacagtggagtcggcgctcgacccgatccacgagccaaggaatgtattattcaaccatacagtctgtccgaatcctgcgccactagacaattcaaccaaaaattatattcttggccattggcgttaaaatggccacggtatagcaaagaccctgtgtgatatccgtagtccatggagtacagactactcggagtatccagctgttgtggactgtgtgtggagcttcgtgtacagcgcgtccaagctgagtcatcgtacaacacctggatctcagggagagaattgatgaactttcattccaggttggacaaatcaggaatgtccaacatgggaagattatacctgacagttccctggaggttcccattgggcatttttgaagtctatagtacttccccattgaaggtgatgcctttcagctttgtagctgaactaggtatgacctcgattattgttgtagcattcacatcccctgtcaggcgcaactgcttatttatcagatcagctgtgcggataagatatccggcctcgacaactaccaggctcttcgatggcgatgtgtaatttccaattggacctgatacgggcaactccagcacccagtagttgtatgcctcattccgccagagcaggtatacctgaagatctgctacccgaatgatgagtcgtgctggtgtaacatgccaccttacaacccaagcagatccgtgttgttttatttcgatgctgtctccttcgataacggttggctttacaagatgactaggcagaccaaatttgtgtgtttctctcgcgcctccgtacagaattactacacgtgtcgatcccgacccgcatgcccatgtgaatatttctgcagagtagatcagattgatcccgccgacatcgtaatctgtaacgtgaaattttgaatcacgtctattcaacgtcaggtggcctccatagttgaggaattttgatgtccccaatacttgtcaacaatgtgagagtataccatgtgttatcgactgaagtgaagtcggcatgtctgacaacgtaaagattcgtcctcgtcctatttccaagtagagcagtcacagctattgaggagggtgcgccgtaagtaccgttcactccaagatgaggagttgccgtcaaatatccgggggaactttgaggaagttagcctcgagtttttgttcactatatttctcgcgccagatcgtcctctcttctgtaatcgcttcaccgtagtcatatgatgtatgcccgcccatatagccgagattaccccagttggtgcccccgaaagtctgaggagaattccacaataggcattacaatataaaatcaagaggttgtatggacccaacatgtaaatgttgaagatcttcacgccaaaactgtagttgttcttgtacaaaactctgacagcctctttgtttaccaaccggccgcacatgtcttggaccagccctcccctataattacattagttcctttcatatggtaaaagcaagaatcgacctaccatccttcatcagaccctccttggaactcagcaatcgaaaaggcgtcgttggactctgccgtctgtgcgtgacttgccagtcatatggaaacttgtaattaggcaaaacagtaaaatttgcgcctaagggggggaatctgtcagccttacagcacgtataacattgaggtacgttggaaacaagctcacaattatagcgcaaggggtacgcatcaatagcgttgatatcgactgcgcccttccctgaccccggcgcgaagtatcccataaccaagttatcattcacaattgaaggaacagtaagaccttcatcaagcagctgctcttcaacgtataccatataattccgattcatctcagtcgggaagtcagtcactccaagccaggtggagtacttgttctctggctgaaccatgatcactgggccaccatttgtgatctgtcccctgtcaatgatccggcccagtatcgatatgtaatttgctgttgcattcaggtattcaggatcgtcggatggaataacccccttttctcgtagaacccacccaggtattccaccagcagttgtttctgcgttgatgtacggtcccggtcgagcgatgaggtataagccagcttggcttgctacgtcaaaaccccatctaagctccatatcccgtcggtgataacgtgtccaggattcccttctacaaggctccaatcaatgtagaatgagaccccggtgaagcccatactctttgttttttgacacgtcgagccaaagacctgggactgggagtcgaaggggtgaaattcgccaggaaagatcatgagccgctctccgcgtattattatagaatgttggtcccacgccacctatccctaatgcgttagtgaaatgatactatcagggtgatactattctcactagatcttgtagccccttttttttgaggtggagtatggcttttaatagacgctaaaaccaatgatgcaactgcagaaagcagagttatcaatggtgacgttttgaacaacatctttcaggggtggtaatcaaactatgagccggcagcgagcaagataatcgagcgagacaataaggcaaacggaaattccaaaatgtttctaagcttgaaatttgcatctatttccccgcattaacaaaaccgactccgcagcaagaagactgctagcattgatcctattgaagggatatttcgccaattaaccagcgcaccggtaaaactactacctgtcgatcatttcataaactacggagtagacaatgctaagtacgagacatcatcccctctatattcctgacacctaccgaaaatcaggctaaaccagattaccctaacgtaattcacatacaagccgccaccacatacgacccgccatctccaaaacatatagtaaacaccatatttgacaaccttatatcttaacaacagtgttattccctgatctaattattcctagatagcgaccgataagaatctttaactcagcatctcaatattaaggtaactaaacctctactattatggtttcaaaaattacgttgcctagagcttgaaatatcttgaaatatatatatcacgatcacaatgtcataaatcttatctaaacttagtaaagagactagatatcacctaagaagtatcgagctataagaaaaacctcttatagactaccgttgttaaaatatcaggttgtaatttatcatatttactatgtgttttggagatggcgggtcgcttgtggtggcggctcgcatgtgaattacgttagtttctggggaaattacatcagtttctggggaaattacatcatggcgagctcatttcgccatcctatcctatgcctcatttctagccactcgggatgagatttcccttcgacacctctaccgaatactaagtgccaaactcttgatccaacaatggccgcacatatcaagccactcatccttcacgcccatgccacgggcccaaacccagtcaaaatagccatggcactcgaggcgctccatgtcccattcgaagtgaagttgtgggactttagcgacaatccgaaaagtggcgtgaagggcacagaatttctcaaaatcaacgagaacgggcgcgttcctgccatcgaagatcccaacaccggtgtcgtctcgtgggaatccggggcatgcatgaactacgtccgccgtgtttatgacaatggtaatacgattggtccgtctggcgactcggctcaagatcttgtggattttgaaaagtgggagtatttcttgttgacaacgcttggccccatgacaggacaggcaacctggtttaagtcagtgactgtgaattcggaagaaatccccggttgatacttactctttatttgttcagaaactataacccacaaaagaatgatgatgcactccagcgatatacagcgcagagctatcgctgctacgatgttcttgagggtcagttgaaaaagactcacggtgaaagcattgtacccagtcgggtcactgccgttgattatcattttgagccttgggtacgcgcctcgtcctacgctggcctttcacttgacaactatcctttgatcaagaagtggctggggcttatggcgacacgggaagaagtccaggaagcatacgtcaaggttcaaggtaaaaagtgaatgagatcataccagggaaggacttaactaggactagaatcaggtagtcatgaaaaattacaaatccaaatacaaacctcaagtatgaagtaaatatcatgttgtacatttttgtctctatatatttttgatcacgaatccaaaatatcaaattttgaatgtccgatagctgcctacctttgtactccaggcaccagaacctttgggacatcaaggagatatagcaaatatgcctttccattgtgcgacttgcttggcattttgcctccacgtacgttgacctgcatagcctggtgtacaagcttaggctcaggcatctggctgtcccgctgagttctccacttcacaaactcatcctctgtcgtgtgcttcttcatgtgcttgtttttcttctcctgctcgccaaccgtaacatacggcaatggctcccgtgcagtatattcgttggtaggaggataatcatggcctgtgtataatctcgtttccggcgggaaagaaaggaggcgtttcatcgagcggtaaagttcccgaggatcgccacctgggaagtcacatcggccactgccaacatctggattgaacatacagtctccggtgaaaatattgctcccgaatttgtagccgccgtggtctggagtatgtcccgggagatggagggcgctgctggtgacttggccaatctggaatatttcatcgggctggaagaggtggtcgaaggcgttgtcgatatctgctttcgcgattgcatattttcgtgcgaaaaaactttggacgatcttgacattctcaccgatgcagatcggtgcgtgaggttccccgcgggaccagagaatttgttggatatagtaggctgctgagaggtggtctgcatgggcatgtgtctctagcaacatcatgatagtgtattcatttttcatagcataatcaatgatttgatccgcagattcagaggtaatagcgaagttcacagtatcataatccaggactgggtcgatgatggcagcttcctttgtttcaggacaagctactagatactgccaagagcaagtcttaggctcgaagaaagggtgaactctcggttccactgtgttggccatcttgaagatcacttgcagaatatgctttcaagttgaaaagtaattaaagttggtgtttcctcgagtacgagcctggctggttggaattacgtatttatagaatcatcagtgccacccagcatagatctagccttaccctacctcaaatccagacagatgggctcagcaatccattaagtgtccatgtttttattctcattgtaacttcctatggggttcatgctctcaagtcttttgggtgatgttttcattttcctccgtgccaggacagcgtattacttcagtcaaaatacagactcaaacatacacccctagaatgatatattccgtgactgcgactatatagctatgaaacaaaagaggatatgattaaccacccccatgtattccatgggactcgtcaagtgactatgagaaccacgacttcgggaacattcacgagaaagcccggttcgctatttggtacagacctacaggacttcaataacttcttatgttgatgcactgccactggtaggtaagttagcaggtgctacgggaccctcctcttacgctatctcatggtgcctatagggagatggtggccagggggatgagaggcaggagtccttttataccccaaacccacgtgccttcctacagtgcccaggtgccttgcaccttccctaagcaacagacatccaaggttggaaagattcttgctgagtcagaattatatgattccaaccttccaagttctacctttccgtttgggcacgaagagaaattaaccagattaaggagattaacggcaggaacagtgagaataagactttggtgcctcttagccgtatctaccgtatgagtttacagtctacgaaaatagaccaccgactgcttctggtttcaagggaataaacttcaattgataaatgactgtattcaaatttctttctaacccattgaaatctctttcttacatctgtctgtttagtgctaaccattgacccattgttttgtcaagcgaccgtccttgcagtcgcagacatttcacgcatacaaagacatcccaggtaggagagattgtctgtaggtatggaatgcaaattttcttcgcggattctccattagaaagcgaaaccactaaaaccgataggcgacgatcgtttcccgatagaaccgtcgctgacagaccattgatcaatttcgctctggtcacttggtacgtcccatcgagcggtttgaagatcaagagtgtgagcggcttgattgaatcggcactgccagctcttcacggccttgcatccgggcttttggcataggtggcccatgtagcatttgattgatcggcaagcgccgccccgagtgcaggggtgctggaggagcatgtatcgcagaacctcaatgatcacttcagagacatcgctgtggtcataggtacagctcatgtcaccgcactctcccgacagatggtagctattacaaactttgtgttcttttgctcgagcgtggtactgatcaaaggcttcaggcgacgggtgaggatagtatgggtcgatacggtccccgtctttattgactgggatgaattcttccgttttgatactcggcaaggggagcatggacctaaagaaatcttcggagcgcccgacaactgtaggggaagaccacagttgtttaggtgaatcacctgcacctgagtgtttaggcgacggctgatgattcaatgactggttcggcataacgtgctgtttattgcagccgatgccgaacttgcagataccctagataaatgtcaattaagaacttactcgcgactgacatcatgtgatcaggaaaaataccttttggaagtgcttgcagattggtttggtggtatttgcaccattagcaccatttgtgccattagatacgtagtgtgcactgttttcaccgttgaatttggccacagtcggagacgcagccgggcctgtaggtggcttgctgttaagtagaggggtagacatgaaaaccgaaggtaattctctgatagggagatccaagtcctcgaattcacgatggaaaccagcggctttgatgagggtgatacggtcacctctgcctctatatggcgtcagcagggagccgtatccagtgtcgtggcagccagcaaaatagatatggcggcattggttgagttcaacgaagagacggaacatttcttgatttcacagcacacatcagtacaacaacaagattgttcatgccggattgttcattacctctgatcttgaaatcactgccttccttcttctctgcagcatcgacataatcaaatagctcttgtgcacgggtaaatgatgaagtaaatggtgacatggatcgagcctcgtggcccataagtccagctcgagctaacgccttcgacaaaccgagaacgttcgcatagacacgaaccatgatccgacactgttcggcctgcattcccattgtcgaatgcataagctcttttatagagtcgctcagttcgcgggcagcatttatgccaccttcgctgccatgcttcaagaaatgttctttgaactagaagatgtgttagtcgatggatttgataccgaggaaagcaagacagtctcaccagatatccgtctccatctacaaggacaaggacaaaagggttacgatcctgattgattgtcagtttcaagctctatggcatcctgtaagcctgcctcctacctgccctctggcctgtcttttgtatttctctcggccttctttaacctcttcatagtcacttttgagcgagctatagtcgtctaacagactcttgaattggctgagcaagtcctgcagattgtcatgctgcttttgctgctctcgcgataaggacagtagatgcccattcaaggaatctatatcagaatccctcagcatcttgtcggaggtaccgggacggcatgtgccagtcccataagccaagttaattcaacgaaggctgcgagcattcgattgaaatttgaaagaagaacgattttctaaactgtgaggtgcgctggacagctatggtggggaaatttgtttggcttgttgggcggtcaatggcccctaggtatcaggtgacccctggcggaaagtacaagacgttagttgtgtcacgtgcaagacttccccataaacattccaaaagtggactagcgttaacgcgacccgcgttcagcctagtggtctcgctcctatccaagttgcaaaccacatccaacgtatacaacgcatgagcacgaaaaagcgaggagctactcgatctagctacgcatggaatagatatgacgactatctcccgtcatattgcggttatttctcgtttatcttaagggattttggttttggaggctaagagtcactaggtcgatcacctgtctaaagctctggcaaagagtatgaggtagcatgccgagacagcattaatcctgtatcgctttatagtagctctaatttgtctgaagtactgtggtctccatacattgtatcaccagggagtagctcctgtatagttatgaaacacttactctgcttattacaaacagacccaaccaccatgtctaagtaacaaaccaaaactagacctattgatttggaataatcttcaatgtaaggatttgctcctaggaatacatttttttgaccgcacgataccatcctcgggccttgcttctgctcgggtgcgggcagtgaacgggtttcagacaactagtatagccaaaaaaaccacaatagtacgtggtgatgagaaattacattgcaaatactctgcactaacaaggggactcgtttaaaataggttaataataacggtgattgaagtggtttccagcgggaaccattcattattaatttatttagggaatagagaaagaaggaaaaaaagaacacatgaaaaaggaaaaaggagatgatagaagagacacaagaatatcaatctcttgggagacctcttcgtggtatgcatacacatcatgtgacctcaaccccagcgccagacatcttaggctcctttgttcctttttcccgtattccccttttctgcttttgttttttttccctgaacgtctgtcgggacttgattatccaggtcccaggcgattccccattcttctaatcatggcggttccatgcaatatccggggttcggcttcccagctcttctatcaagaccaacaatgtcctcaatatcaagcccttttggctatcaccgagatgccgcatccagatcgttctattgtgggcgcttttctcatggatgcacgaaatccccaggaagcagcccgctacttcttacgagagaccgcaatcgatggcacctcgcactccgtcccagcaaggacaatttcggaattcctctcagattggaaatatttggtcagcatgtgtaagcatgtcatagttatatccaaacaagtttatcttgcttctattcctgacttgcgatcgtgtagttcggcctattgtagcaacagggctgtccgctgagacccagcggctggtgtatgaaagagacggcgggcgctgttgcctcacacaaacacaattcaagtcaccggaggattctgacctgcactttgtacacatcgttccaccacgggtgttgatgcatccggatttagtcgagggggtaagtatattcattccatatcatgcggtctttgttgacactagcacacaaggctcgcctatttgagatgctttacgcttttctgtccaatgattccatgcagtcgcttcggtcgatccttcccttgaactcgtcaatggagagacttgataatctctggctgttgtcggtctccgcattcgagcttgtagaggccggcgaggtatggcttaagatccggagctgggacccgcaaaattcaccctacagaaagagtgtagatcgccatcaagccctttatacgagtgcacgctgatttaagactaagtatagcatcaacaccaacctgtacaggtacaaaactcggagtgaaatgtccattgctccatcagcaaagatgttgcttcttgatgataaaaccaccgataaaactcctatcccccacgaagctctttttgagcttcatgccctattttccaagtcactggcatggatggagacacggaggcacatgatagaacaacgggatgctcccagtaggtttggacctcgcttttcctgatcatttctaatagctttcaggtgcaaacatgtttcggttctcattgttgcctacgctgttatttcgcaccatcagacgaatatggaccaccctgccatattttattcgatatagagcgtatgaaaagctccattcggttggcttatacctctatggacaatccctttctccaagagtccaacggctgcctttcgggctgtatttacgcaagggacgaccgcaacaggcagttcaataccgggcagaggctcatactcttggcatggtggagaaattcactcaaatacctgcgccaagagcaattgatatcttggaaacccctaatgcttcatatttgctcatgacccaagtcccaggccgtccgatcggccagctgctcaatactatgacggacaagcaagtggaaaacgtggtgaccgacctaaagcggtacgtcgcccagctgcgagcgatccctaacgaagtcagcaaatttcaaatctgtaactctcaaggtggcgggatcctggactggcgcatccctgatagccagtcagaggaattgcgcttccaaacagagaccgactttcacgactatctgactagaattatgacggaagatactcgaaggcatgcggccaaatcgcatgccaccccacacgcgatcgtatttacgcatggagatctaaatcctaggaacattctcgctgagaacggcaagattaccggcatcgtcgattgggagaatgcgggcttttttccagagtactgggagtacactaagatgcattacacagttcgcagcttgactcgatggctggttgatgtcgttgatcgagtatttgagggctaccgggacgagctacatgtggagaatatgctatcagatttatcaggccccttttaagcccaaattatatcatataggctttctagataggataaagcagaacttcatttatgtttgggatgtatgtaaagttcactatgtggcagtatcatggctcctcttgctctcgccttctttgatcttatttgcatcgtctttggaatatctttcgactcggttactgaacggccctctcatgaagacaacccagtagtgatgaatcaaatatccaaaatgaattcaatccaatccgttattgtcgacctcagcattgtccgcacctccctctacctcatccttgtgcgaatagccccgttcgagtaactgggcttcgatcacagagatatcacgcggaagtacgattattccattcttgtggagctccacaagtgcatccttcacccagattcggcaggaaaatggctctccggtgtttggagagtgagagtagtcgaagggaaatgcgtctaggatacttttgcaggcttcgaatgcgctagtgctgagggaggcgagcttaaaagccaggacaaggctcatggagaagggaacgtcactggacgatcggggcgtgacgttccagccgccgcttcgattggtcgcgtgtcacacatctcccactggagtgttggtcgggatgaacaacccccagtggaagcccggggcagcgcctcgactgctgagcaagacatatagtgaatagttctcatacagacccgcaatctcggagcttggtcgaagaggcatcttggcggacgaaggcagatgtgcactagtaacgtggatagtgcggatcgtaaaaagtgtggacagaaaacttcagatgtggaaataagggaagtttcgggggggatggagaatgctgggaggagtaaggagataggaaagatccagaaatcatgtatattttatacacggaagggaggctctgcccaggagtcggcttgttgcctagctcatgccagcgcacgatatgcgtgcatgcatacggtgagtggtatgataggcaagtgagagtgatgtgatggacagtcaacatacactaagcgctaagtgcctcgattgaaaccaagggctgcccagtggcctatagagagagtatttcaaagaggggtaatgcacccccctgttaagttattgagaacacgaccaacctgcttgttggtcatgttgataccggcagtgaaatgaataccaaagggtgtatttacttcataaaatacacgtataccctcagtacaaacttgcgacaacttagcatgttagagacgcttcgaaggcaatcgtttgatatgggttgcccatacggctcttcgacttatattccagctatttgtgttagtatatagcactcataattcaagcctaggaacccaaccttggaaggttcccagtctacaaataagacatttaatgagaccggctgaaacgaggtatcaaggcgaaccgattgggaagccatggggtaattttctataggaccgggaaccctcctgcgccacatggtgatttaggattcttgattatttcacccactgtgatgtaaaatcctggggctagtaatgtgggattatttgcgggactaaaagcatagccttggggggtgtacatagggcttgcaaagtgactgggtggactacatagccaagtccttcatgttttctgataactagaaacagtatagttcggtcatcagccagtgcaagctatgtagatcttataattccgcagcgattcgttcaaactcaaatctcatctcaatattgccaaaaaccctagctacaaggaaaacaccacctccaatcaatgtgatttacacatcaatcggagccttgactagttcaagtcttacgtcgttatgtatgataaggtttccaagtacaattacgtcctaaaatggtttgtccgatttataatcaactttggttttgctttcaacactattgctttccgctaaatctctttcaagaattcaattgtcatggagacaaccttgaatcggtgggaaagacttctgtacatatctgagcatgtccatgactccttgctgcaacatcccaagccgcttggacttcacttgacacgccgtactttgatggcctcatccatgctgctgtgcctgaagttgcctcgtatctagataatactcggttgctggtgggcgggatctgtcaacatcaaggtcctcggatttcttacatttaagatcgtctagaccctaaccgatgaggcgcttaaagtcaaggagtataaagataacgagaagcaccgtcgcgggggggccgaggccggtaagaacctcaagaagcggaagcgcgagaccggtctattcgacccaggggcgtactcccattgagcagcacattcgtgaggcctaccgcaagctataggctactctacagaaggccgtggctatgctgttgcataatggtcgggttcctcaccgcattcctcttgcgttggtgagtatataaatcttctctgtatattcttatgctaacaatgccaagatttgaatcttcggaattgacgccgcttcatgaattacgcgaacggtagcaggagtttgcggacgatacccaactttgtcttgttttatttgagtttattttgtttggtttaatgcaagcgtctgaagttgacttgtagaaattcgggattgttaatgggacccctcatgcctgaattttgacagcgaaatgcacccattctgctaccgccttcccagttaactacaccgccctcctaatttgtaataccgctcgttctccctcgtttttaactggcgaatatttgacttgcagaatatggggtacagcaggtacctacaatttgtatatgaacccttaacaatatcaagtcacttttctagaggatggcgacagcgaggttctctaagtagaagatttacagtattgaatcagctaggataagcacttttctgtaagcatagaggtatatcttttactatgtaaaccagaagtaggcagaatacatggcagaaaagataaaatgtggcagaaatgtagcagaattatgagtggtactagatcaggaaggcggtattggaaattaggtaatttgggggcggaaggacgggaaataactccgccttcccctgtcccaacctcagaaagtctcatccaatcacgtcacacgaaccattcccgtttggctgcatcatcatgaccctgccatccgtcgttagtgatcacgatgattctgatttcgttctcccaccccagacagataaaggcaagaccgagacaagcatgtccttcacttccctcatgtctgctcttcccacggactgtatcatacggaacttttcacgcttcaagggcctacggcttgaagctaagcagttactaaagtctctacaagagaagggagatggaaaccagttcatcgttgtcctcaatctatcggccctaacaatcaaaaagctcgacgaagagcatcagactagtctggggggcattgagtatcgtttccaatgggaggggacgacagggctgattaaagtggttccgtcagaacgccatgatgcagtgacaaaccaactcggtcgagcaatcgacatgaagcttactgcaatgggactaaggtggtcagagatgatctggactggaacagctacatacaagcctactgtcggtgtaggtaaacagggagatcacgcattcctaccaccaattcgctgccccaatgggcttccaagtgggtcatggccgacctttgtcatcgagacaggagtttctgaatctctccctcggctccgcgaagacgctaagagatggttcataatttcccagggtctggtgcgcattgtcattcttatctcgattaaggcgactgaagtcacgtttgaaaaatggcagctagccccccccggtgccccatccccactcactcgagcatatcttgattcactccgcgcgcagctcgtcaatatccctccacttaccaaccaaccgactcccacccagcaggcatactcagcgcaggaggtctacgtccggcgcaacaatgttgtcggggcccccttatgtcttccatttgtcgctgtttacgaccgacttccaggaccaggagaacatgatctccttctcaacgtcaatgatttcctcgaaatcactagaatcttattctgatatgttctagtttgctctcggctcactgcccatcgtccccagatgcctctattctgttatggtctgctatcgggctccctgcccatcttcccccatattcttcttcgattttccgtgtattctttgagatagctctacaaaggactgtaccactattgacctataatctatcccatttatcagggatctagtacgtacattttccttaacgatccgagctagtatcacgttgagcttctcgaggtcgaagtacaacagtctaccctagaaagattcacccacttccacagtggatttactagcgtatagatcaacatggtatttaatatggtattttactactcatactaaattactgcactttttttaaaaaataaatacagtgatctcaatttctcaactttctcaacactccatttctgactatttaacacctacctattatcatgtctgcccactcaccggaatcttcatattagatgagaattactgatcaatttagcccgaccatatttggcctcatcgttcagggtctcaaggtctttctgtattcacatctgaaattatgtccaagggcgttcaatttgtgcaagcattcatacatcacaaggacacagaccgcttcttatccgccatgatttcataaatcgcgtcgatgtaagccttggcgttggcgttgcccatggcccctggtcccattttgttcatggcataaccaatagtcatgcggcgatctagatccatgaccatcatcgatccacccaaacctcgccagaagcaaatgtttccttcggggataaaggtgataacctccggcagggcgactccaagcccaaatctgatgttgaggtacaacaccatatcgaacaccgctaatccgctcctggagcatctggtcgatagtctttagtccaagatactgcttcccatcgacagtgcctctcagtgacacacttgggtactcccaactcctgtactagatcgtacttagtcgttggctcacccaacctaatagaaaccatgcgatcctctccgtatcacactatgaaacagcatcgctagttagtgcttggccattttcattgctttgtcatccaggatgtttgcccggcggatgattaccccggatgtggccatgattaccagtacctgataagagacctcctcctgtacaaataaccacttttttatcgagagtatagttgctttcaaatatatggataatctctggcttctgcttggacaattgacgtgacgtcgctcaagtatccttgctacacacttaactatgtgggcaggctagtttcatatgcgacctacgtaattatatggacggtccgctctggattctaagagcgccaggatgaataaatacaggctgattccatatttgtgaatcatgttggttttgttgattatctctaactatcaaatacttcagaatatcgtcatacccgaaccaactatatatatcacggaaacccgcgagagaaagccatatatcaaggctgtaaaagggaacaaggaagctgggataattgtcgagaagagctacattaccagcaagcagctcccagcagccatggaaagccctggtgttgcgcgacctaacgcagcggtatctttgggaaaccttgagggtgaccttgaatgggccaggaaatgtgacggttgtatatatatgagtataatgcccttaagatccatcacccttgtgctaaattgtagaatgctctgtcctcggtggcaagaaaaacaaagagaagagacacaagactcctcccatctagtaggcgaggctggtcattgcaaggtcttccacgttggtgcttctactcggggcaagttcatcacagtcttcaaaatctccgaggatcttatcgattacctctgcctggccactcacatgtagaaagtttccaatggaagcgtggatttggagaagtctaggatctggaagttcccaacttccgttatgaactccgaaattaataatccgattttcaggtaagagacggcttgtctttataacggtatccggaaaggtcttaattcgatatcgttgaggagttccagtttcctcgaaaataagtctgaaatgaccgaattccttatgaatgtcgttatctagcatcatgatattattctccgaattgatctgttccgaggtaaagcacatattgcgaagaactgggaagtagcgccttaggttaacccaaatcgctgtatttctgtgtcggtgattggcttgaaaagatccgagtgcaaatggaataatataggccgcttcaagataggtcgttactgcgttccgtggataggcgtgagcgtgactatacagccccgttgcaagacatttattaccatctctttctaaacagcggttccagagttgcgactgagagctaagatcctcaattgaatcttcaacgccagaatgcggagacagagtgacctcagtgggtattttaccaccctgttctttcaatggaatcaataagccggttttaatgctttggactagttgccgaagcttctcatcgtttgaacactctaaaatgtccacctccagattttcttttccgccaggaggaaggatctcgaggaagtcaccgaggaagtcctttgttttgtctgtaggttcaagtagtacgtagctgttcaactttcgatccagcctctggcttggttatgagtatcaaaaagactacctagaaggcataagcggacttaccgtctgggatgatgacatcactattggcacagtggtctaatctaattaggacaggtcaatcttgttgtgctaatgctgatgatttatagtcgtcccttgagcagtgaattctcttctgagatcgcgatggctgtgacgtgccaggtcttacaaagatagaagagtgcatcaattcaaaataacttagagagagagagagaagaagcaagttgcaaagtgggaagcggcctgcttatatggttgacctttgcaaacaatgcaaacaaagcaaacttcaaactctcgcttagcactaaatttggttctgcgaggtgctgcagcacttgtcaaggcctggtatattatctaggctttgaacttttcttttcgataattatgaacgtcaacttctcctactctatacgcttagtatattggtgaatgcccgagggccgttttataccccaactctatgaaaatttgttctcgaaaggagaaagtgatggagatggaactcagtcatttcgcgagtttttccagctaatgcatggttacaggtgcgccgctgatcctttcggggtaagtcttcaatatggatggtaaatctcgactgcacatacgaaagactttgggtggtattaagcaatacattcattttgtggcatgtagaacaccaccgaaagacagcaggtgtagataggaagtcaataaatacatagaaaaaggtatacaaaatgaacatatctggtataatgccgtgcgaattaaaaatataaccaaccacagtgcaactggcttccttcatcctcgaaatatttaggctgctttagcagtaggttcatgacctttctcaagtgccacccgttcctccgacgcggaagagaaagacacagcctcaccgggagtaacccgctgcgccgcatactcctcatccggtttccagaagtccttctttccatgaacggcacggttaacccagggtggaaggaagccaccctggagcttccaggaccaaggatcggactcttccttgttaggcgggacaatgcgaccaaaggtgactttctcaagacaccaggcaatgccgttcagggtgatgtagctggtgataccggcgatcagaccgtaggcaatgctgtatgtgaacggcatgatagcgatggtgaggaaggcggggatcgcatcaccgtagtagcgccagttgatatcggcggcagactgggccatcatcgcaccgacaatcacgagcgtacaacccgtggcccaaggtggaatggaagcgaaaatcggagcgaagaatatagcgatgaagaacgcaatgccggtgacgcatgatgtcagacctgttttgccgccctcggaaataccggcgccggactcgacgaatgctgtgacggggggactgccgagaagggatccgatggagatggaaatagcgtcgaccatgtaggcaatggcgctgccctcgaagtcttgggtctcctcgttgattgcgccagcgaatcgggccatggagtacattgttcctgtggtgtccagaatatcgacatactgccgagatgttagtcttcaacctctgcgtgtatatagagcttgcgacataccaagaatgtgatgaaagccagtccaaacttgccacccttgccggccaagttccagtcctgagcgacaagaatacgtttgataggatggaaagtgacaacttgcttgaagaaatcaaacctgctggttccgagctcagtgtaggggaagtaagtgacgggcgtagtgcgaggccacgagatgatagaaaccaacaagatacccataatgacagcacccttgatgcggtacatcatgagcatgaccgtcataataccgccgcagaagatgccaacccacatagtaggactgcgcatcttagtgctgctcagacacaagcccgtatcggggtcgtaattggcggggaagtccgcacatccagccaactcaatgggagtgtcagtgccaccctgaaccattccaataccagcactgtaggtcagaccgatcaatgcgaggtagagtccgatgccgacaccggtcgcgagtttgatagactttggcagggcgcgcgccagccactggcgcataccgatcaacgtcaagcccaagaatacccatccttccacgaagacggcgagaagggcagtcgagtacgggaccatgccgctaccacggactccaacaacggtgtaagcgaagtaagcgttcagacccattccaggcgcgagcgcaataggcaggttggcgaagaaacccatgcagaaagtcgagagacaggcgatggcggcggtggcggtgatgaggtcgcgattgacttcttgcgtgcacagagcgtactcgacattagttgcgcagaaatctttcatgtcttcctcggggcagacgcaggttccaccggtcagagaggtgatattgctgttgacggagatgatgtatgccatggcgaaaaatgtggcgaggccggcgcggatttcagtgaagaagtaactacccttcctttctctaggctgaggcatggtttaatatcacattcaatattactgcgatcgccgatcacatagaatgcggtatcacttacatggccagagccctccagacgaaaccatgtccccacgggactgcgagcaactcgcacgttggttttgtgaacccagttagcgaagcccattgtgaaagagtatcacgatcgtgtgtggtggagacagcgaattccggggatgctgtcgtctttaagacgcagtatttaaagatgttcccgcagtggaggtgtgcaggatatagggtccaagggagaaatagggcaaatctcaatgtgctctcttggccaaccacaagctgctgataagaagtcagcaaaaaaaattagtttcgcctccaaatacagttatctccggggtttatgccttggtggggtcgtgtttcacccgtaacctgccgtctggccgtcctcattggctataccgttgccgacagggttttgttcaacccttcgaaggttgtctgtgaacgaagaactcgacaaccaggtgatgaaaaaaagggtccggacattatttcaagtccctgcaaatccaacgtgtccgaatcaacccttggaacatccaaaaacgatctccatgtgctttcacaaatgttgcacatgaacattcctgcaatgccaagacgcccgcaatgccaagacgccggcgcgctcagccctcgtgagctgtctatcttatcgattttctgtgtgtcgtgttacttggaaagatgcagggttctcgataacggaggaagccgatgaccttaataaggaccatccatccaatatccccagtctcttggctgtgggatatccggcggccatatccgatcgtgggccatcacggaatctcacccgcagatatcggatgcgttcggtctggcacgaataagccttcatccatctgatttacatctcggtacgggatacagattggcatttgctggcacggatgtgctctgccaggagaaacaaggggttgcgtcagactaaaccgatccgctccgccacgtgaaccacgaggcaccagaaagtcaattcttctggatatctcgtgctgatctcttggatacatgcggaggacggcgcacggcgtatagacagtgcacagcagacagattatcttcgcgtagtatccacgcgtcgtcaccgttgctatcgcacagggcacgtgctggaagtaatcatgaagtcgcctcaactaggatttattcgagcagtctcttacatagagctatcgcagcatctttgccatccattatgcgccgcctaaagaagatgcacgacgtttacaagttgaaacataccgtgccgagggctatcgtccaatgcatcatgttccaccatcggtatcaacccactgggaaatggaaccacgcaatcttttcaaccttgccaatatactatcctctgtggagtgtgacgtgattcttaatctattcacgcctcccgaatgctgccatgtctgttggctccctggacttggactgacaagtgctcctgagtatctgatggtgtttcaaagcccccgtggcctgctagacgatgccgaccttccagcattgattctcaagatttatgatttaggtggaggtactggatttatttttagacataaaactcccaaggctaagacgctcaatggccgtccaaatggccccaattcctctgatcccgtcacttggcctagagtcaaaatcgatatctggtctttggacttggtacattgtctccttactccacactttctggattactattctcaactgacgtatgccaagttattccactttgccacaaatgaaatactctttggcctgggtgtatatctaccgaattaaacggaggtttgagacctctcatgttcaacttcgttcagagtgagagtgaccatatcacagtttatttggatgaaagactgcggcctgaattttgcgtagacaatccagagaaattgtcgactttcctttggtcaatgcaaccaaacccacaggattgcaacctatggccggccttctacggagtacttcatccattcaaaggagtgacccacatgagacacttcaataattgaaggttacaatttttaaaattctatggatttcattattagcaacagggaaattttatgtatgaaaatgcaaacgtaaaggtcgcgcctaaacagactctgttttctccgaccttgatggaagaggacgctcgaagactggagcgaacttagatctcttgcgcaacgcaggtccatatttgatgaatagcaagggaatcgggatcatgatgagtgccagacacccaagaagtgtgccggcccactgcacacccaagttgatgaacatctgcttcgagaacagggggaatgcagctcccaccgccgatcgaatgatagtattcgcagcaaagacagatgcggcactatttcatagtcagtacattgttccacgaaaaaaaaaaaaaaagtaaaaaaccagcatgcttacaatgtcaaatatgagtcaatcaagtaattgaagcattgcaggaagatgacataaatgccgaatccagtcatgattccgctggctgtgggagccatccaatggattgactttgtccatccagtccagccataccagaagagcccgatacaaaagcaaatacctccaaggatggcaggaggaagtctccattccggaatgggcatgtcattgttggcagccaactttttggtatatgccctctgatcataaaggagataggccccagctagaaactcgccaataatcaatccgatgaatggaagacttccaacaccgagattcattccgtggattccttggaatacaacggggtacgcaccgagaagcgcgtacatcaggccatatacaaagctcatccagagagagatctgaggtaaggttagtttggactggcttgagagattcacgcacaacttaccagaaaaacaattggctcggtgaaaagcatgcggaatggccgactgaaattgttcgtgatcagatcgccccaatcgagctcgatctcttcttgtctcgcgcggattccccaattgtgtgtctgccgtcgcaggatgacggctttctccacaaggacagcgggtgcataggtctctttcaagaaaagaagacaaagaccagtggccagccatcccatgaaggaggagatgtacatcgtccaccgccatcccagataagacatggtgatgaagccaccagtgaatggagacgcgaatggtcccacgaacacagccatggcgaacatagcaatagcgacaccacgcgtctggttattccaaatatcggcgtacacggccggaacaatagcgatcgggctagcagagaaaaagccagcaaagaatcgcgatatcatcaaagtctggacgtccttgctggtcgctgccgcaatggagaaaatggagtacccgaacataccaacgcagatcggccatcgtctcccgatgagctcacttgccggtgcccataccgttgggcccgaagcaaatcccagaacgtatagcgtcacaccgagcacagcgacttccgtgctgatgtgaaagtgagcactgacatgtccgaccgtggaggagaagatggcactggcgaaagacgaaacgaatgttgtatatgctagggtcactgatataccgattttgcttgcgagggaccagttctgggggtgcataggatcgtctgcatcgttgaattcgacgacgtattgttccgggtctgggagtgatggaggatgaggcttcccagctccgagggggagccactggtcacgcggtgtgattcctatgccggagccaacagttgagcgttgttggagtcgataagtattgattcgctctagctcgacttcgttgggattgctttggcgatgagtgaggcctcctgagggcatgggcccagcttccgacagacggcgatcatcaatcgtcgggatggtactgaggtcatcacttccactactgatagaatcatgtgggctgtgactccgatgagacatgctgaaatgctgaaggatacaaaatgcaattggattttagagacgaattttatctaggaaatgagcataatatatatgggaatcgaccaagctaaagatttggaacatctggttcccagggatcggacggccattttcatcactttgatggtaacagacggcgtcatcgagtgtagcttccccggttgatccgtccaaagtgcgacggcagtttgcagagcggtgtactatcagtcccaacacggcaatatgctccgagccccggtcgcgaaccacggtacgatctagacatcggaagtctattcggcacttaggaacaagatccaagatggggtatcataatagccactgtataccgacgggactattagcagtagactgggagagtctgagagtcagtgaagggtcggggaaaccaccgacagcgaccctactactagtacagatcttaaagtatagcatcaccaagaagtcaacaataaaggtgcccatttgtacagagtaatatctggtcattcacatttgtgggctttgtgcgatcattgcgagtgtccgagctttgaatgtgtgtggatatatcttcgggtatgaaaggatttgagtaaactcggggccttagatagcgacaatatagaatgaagggggttgacaatcaatgcttcaggttgacataaatatggcgatgacggtttcgaaattgtcatggcagctatttcaactacatgtagtaccgatactccgtaccccggctttcgttcaagtctctgaacccttaattctaaaaaaagaatcgcagaggaaacagctatctcccaaggcagggacaatttcttccaaatacatgtgggctggaaaaagaaattataatagaaacacaacgaatacaaaacttatactccgtatagcataagaagaaactggtttatgtctgatgaaatgattttcagttccactagggttagagtggggcggagcttgcctgttcttttcaagctctcaccaagcaagcctatctacccttggaactgccctaaaaatgtgatgcatcatatacagttgagtacgaagctgcatgattgtctatcctatgacttgacggatcggcgagtatctgctgtttgtttcatgagattattggctagttaactacgcgagatattcaatgtttgcaaaggggcagctatcaataggcagcttcccactttgcaacttgcggcttctttctctccaagttattctatattgaatgcactcttctatcttcgcaagacctggcacgtcacattaaatctatttgcttgatttgttcatcaatcttgaacattacccagcaaatcaagtgcctcttctgcaataagacgactagagggtaaaaatcgcattaatccttggattatatggagtagaggtttgagtgttggatcgggtaaaccagcaaactcccgttcaagcttcgaggttccgtaatcttcgaacaaaattagcaacagttctgtatatggatcaatttacttaccatcttctagctccagattatgtctagaattcctcagcattgattcccacttagacttccattcagccaccaacttctccacgaagccaatcatctggtaaattaaaatttcgtcctcgccaagataccagaatggccaagtcgtgaagaagaaggaataaatctacaattcgcggtaagtatatttccttcaaagaaatgatatgttaacttaccatgcaacctatgcgctataagtcgacgcgataatcaaagtggtcagtgaatatcgtctcgggtaccctcaatgaagccggctaggccagcttctgttcctatccttgataagaactctcgccgaaattgaggagccgaatatcttcatcgtcctcgtctatccactcagtccattctgctgccttgatcagttgggccggcaattcattacctagaggtgtgctattaacacgttttagcggctcaatttatgaatacaactaaatgcaatattctgactactgatatctaatagtatatgagtaaaaaggccaactatagaaagctcccttacctcgatggcatataccggcactgtgaatgaatttgatagcttttggaagctgcgtagaaattcagagcacagtttccgggtcgagtttatcgtgagcctgatggtagtccgagagaaccttaccaactgaaggccaagtaattcaaaaacaagacattggtgggtcccgttagggcctatatgtataaaggcatcaagcagctgaacaatatagtttgcagaaagccctttccgacattgcctctctagaaatttcaaaatgtgtagctctcgcgatatcgacgaatttgcggtcatgattttcaaggagacccattgatttcggctggcgtgagattagctagaaatgaatacagttgctagccccatcttaccgccccatacctggatgggggcggtaataccatcatcccaccttgtcagggaggcacataagacggctacaggataaaccgactctctgtctttcgcaagccatactgtggaaaagccaccctatcctaacttgtgatgtatcttctaacgatcattttcaaatgtatctccgaggttgactggatggtatcccccaggctgatattttgacaatgactcttgtgtataaagaaggttactttggcagaacagagatagatccatcctagaacgcaaagcggatgagagcagggaggcgtttgcgatgagaagttgcgatacattcagggtaaatttcgctgccaagttggatgactaaccaccctgggtgttcttgaattctactgtacgtgctttgacgaacagagtgagatcttgtccctcatcatattgtgatattgtacaaatccagttagcccctgtctagtgtcatgctcgatacctgatttcccttgcgccaaggcccgggtaactgtactgtgtgacaagggctgaatggatcgacgagttgaggccccggttttaggggctggttatgaggctcatacccaatcaactacatttaagcgctgaaggatcagtaaatggcaatcatggccaaatggcaattttagcctcgcatgactcagacaggattccggagcccatttgcgaatcgtctaatattgctttgcgctcacgagagtctagatccttcacgcccgctttaaaaacaaacacttatttctcctgcatgaggggctgtgtactctgtaacccgtaacgcataaattaataactccccgccatatcgctgctaggagatttttgacttgagaaccccctcaaactccccgagatgaggcaatcgaaaagcgccccctacggagctttaccaggcgaggaaaattactcgagaacatcagaattccaatcttatacggcaatcgaactccctgagatcgacgaccagaaatatcgaccccaaccccaacccctcaaggtctctcagttggatagaatttctcgtctattatgggacttgactcttgccattgtcgccttgctcttcacggtgttcggtatatgggtttcttgtatcgatggaaaaccggcgggcccggactccatgggctccaaactatttgaagtctctcaatatgttagttgccccaatcctacgctcgtcctcaagatcgtcaaatctagctgacaccgcatttcctcccaaaggcacccactgtattcccagtccttttcgccgctattgccggtagcagcatcaaaagtattgcatcgtggcgcatccagaccactggaggagcgacgatcgggctagtagagcaatgtctcggcagccagaatatcacaggagccattctcacccagatcaggctgcgcgcggtaaactttgtcgccgtctttactattctactatggtgcctgtctccgctgggcagtcaagcatctctccgggtgatttcaattgtcccgagttacccaggtaatccggtcgagttgaccactttaagcacttttactccgtaccagtacggctaccaccaaatggcaacggaagccataacatcggtcgctaaccccatgactgcctccttggctgcgggtaggatacttgcgacccgcaaccaagatctctggggtaacatccgccctcctgtgattgagaatctcgagacaaacagtacgggttggatgaatgcaccccaaaacgacaacttgacgtacgcgtctcttgtcggcatgccggtgattggcttaccaggctccggcaacacatcatttaccctctcaggctcgtatctatccgtgtcctgtcctgtcttcgacacaatccacactttgaatttcaccaatttcaccgggtcaagtgctccatcccccggtaatggcgacgattgtagctggacgagcgcatggggtggataccagtttatgattgccatctcggagccatgttcgtactcactcaacgcatcaatgacaaggactcggaatgcccgtaaactggtatgggaatcatgggatcgcggttacgcaggtgctatcgatgatagatcccccataacacgagccatatgcgacattacgacgacctatgtcgattccaacgtgacatgcgagagctcaggcggaattcagtctacaaacacttgcaacctgtcctccgttcgccggtcggtggatgaatcacatttccacaaaaactggactgtcttcgatctcaatttgccaggtgatcccgagctaccgaaaagctataactacggattgttggatatcctcactaccctgtatccctatgtcgagcagaatggcggtctacagcccttgattggatattttatcgacccttataaccccgtcgtggacttcttcggcgagaatctcatgtcgcctaagaccacaaccccgaaagtctttggaacgcgtttatcacagatcttcaattccatgctctatctcggagtcagcccctcggcattcacgggctctgttaacatgacgaaaatcacacagaaaggaagccaaatcaagaatacccccgtcaaattcatggccaaaaacacccatctgcaaaatatcgtcaaatgtgaccgtccctggctcgccgttctcatagtttcttcagtggttatcttctgctttgcactggtgggcgcctatctccacctcataacgatcgctcccgatcttctaggatcgatctctgttgtcctattgcaaaataagatcgaaggaattgttggatcttcaacatggtcttcagatgaatggtccaagaatacgcgagacacaaaactatggcttggagatgttcagcctgaaactgacgttggatgtcttgcgttaaccaccgtggcacaagatgttcctgctggttcagtgaagcaaaggctgtattattgaaatgtatgctgtagctgatcaagaatggcattctcaggactcccaatctgagcttggcttggtgagacattatatgaaagacttcatgtttttatgtcttttttttatcatatataccagagcactagttaatagattatatttttcatgacacgtcactccaagctccaaagatacctaatacagctaaggctgttcctttgcatctatccattctcctagctacaatatataggcggccgaaactcatgtcctatgcttactatttacttgggcaactgtgaatgcttactaaaaaggctgaagagtacctattgaagaggagactctgaaactgggaaagtaggagcactgacagccctgtctgcaaaactggcgtgagaccagagttgtcactgggagtagtaggatgctagagaggagaaaaccatggggtaattaccaagaatagaaattgattgctgcttttatacacatgattacttggtcatcaaaatctggaatcccaactacactgcctaaataggaaggtaccgacaggtgaatgtgccttcaaactcggagatggaagtcataacaatgacaaaatcacgtggcgcgctcatggtacttcacgaagagagatctctgtgtaccaggttgctagtcagctcgtctctcatatatgcaatttcatcttgtggaaggcaggttatttgtacactagcaggagtagagagatttaagagaaggggaacctttcaagtctaatggaagaacaagcgagaagtgcggataagtgaagaaataattatagtggacgtagtcgtttcatgattgctgagcgtagtgcagaaggaattgacgagaagaaggggagagagaatgatgctttcctcttttgatggggccggatatcaatatcaacaccaagtggcaatgaagggaaaaagacccaaatacaagcttcctgctaacagaactagatcaaacacatctcgacacaagcaacaacatcagctaaaataaagcaacatatccgctcatgagacattagaaccggttgaaacctttcttgatattgtttccatccatctcacttatggggctgctgcccagttcagcacttccttcatctccaaccaactcaataatcttggacccagggggaggcctgaatgggcgcacggccgagtctgctgctttctccacaaccgcggtagtaccacttatcgatgatccagtagcatccgcctcatggggctcataaccaccatgctggttggcaaccgcggtgttctttttgttcctttttctgatgagaatgacaacgaaagcgactataatagcaaccgcagctacgacgccaaccacgatgcctgcaatagcaccaccggagagcgatgaatcagagaagccgctgtcagaattggctgtagacactgcggtggacccggtggggattgcggataccaattctgaagacacagatgaaggtgtggatatggatgcagatgcggatgtcgtagcggatgtagacgtcgataccgcgagtgtagatgtttggtgtttggcatcaatctccgtctcaggcaggacatcaaaagccgcaaatgcttcactggcattctttctccatatttcgcatgcatatcccgccctggagtcacacttgaggtcgcggtatatcgagacacataggccagatccctcgggatcccaggtaaaaagcttttctttaccaataggggaatttgtgcagttctgtgaatcttggccgcgggctatttcagtggcattggtcgcgttggtgtagcggaaggtccatccattcaccaggggaattaggaaaagtgcatataatggtatcatgacggcgacgtgggtcttttgaagagtgaatttaaggaaaggaatgaatttcgttgaggttaaatttctagctggtaaaagtccgggagggggaacatagcagtaatatatagaccctggttgctttgaatttgaaaagaataaacctcgtatttaaatgagcctcgtccgtggagttctagcccacccctgcatccagtgaaagtccccggttttggaccctgagatgactgcagcagccgatctatactaaggagggaaatagaccggtgaagactgaggagtcaatgcatattaacacggtctctagcgcatctccaggatcggaggccggaccggaagagtatggatgagtcgcgtgcgccgtagaagaaccaaactaattactttctcaggaagccataatataacagtaacaggttgaaaccgttctaacctcgagttatactaacgaccttcatacaacgggtatatagcgtgaatactacaccatgagactaaatatttatctgacacttggtggctgaccattcccgagaatacggggtacagtagtcctgtgctggtacttcctaccatgcctgtcagaatcatagtctaaatccaaatgcttttagctatttctgttcacattctgcgactagagtctcggcgggcagccatcttgtccgtggaaaatggtgattggtgccctatgtgccgaatacgaggtgaagaacatgcgaaaaattcagactgtaaactatcagtttgtctgctgtattgtagaaaaagacaaatataatgaatggtcatatctgtaaggccacacataaggagtttgtcgctatattgggtcattcacggcccggggcatcatgaatagagaaaagaaaaacgcacccagtcgccaagagtcacggaccgataatgcttggtgccaagggtctagtatgtctaagtttaagtaatttccacttacttaactccatagggcttctcctcggaaattatgatccaaatccgttctagtagcagcaaatagacgatcgatatagagcgtattattagggtcctacggtagaccatttcaaaatattctcggtgtataaaagcatacaatatagcaatgttcatgacagtattgaatcaaaattgaaatcacttacccataagtggatgagatgtttcccttcgatgaaggctccgagctaagactcaaatgcctgaggtattactcggacgttcgaatcaacagcaacatgtttgtgtaaagttttcccgcaatttccccggagatgaattaaagatcatactaacattgaaagttgtcaataaatatcccagatggtttttgctaccgcatatgacgtcaaaacacagtttcaaaggtatgatgctcacaaagtcatcgctggaaacgatacttgattaccattactctcaagcttggggacgagaatcatgcagtcgactagaaggccaagtatttgattttcttcatgtatacgtatgatagacatcgtggcccctttctccctagtccggttgtcatcaggcacccgacgagccgagagtagagtatgattgaaaggtgacgcagcggtgccggtaaggcccagggggtgtccagacttgctattttgtgagtagctattgctctgccacatgtggttatttttcagcatacttgaaaacttgcatgcgagctccttacatgcgcaagatctgtaaatagcaattggtctaagtacattgatcttgcagctcagcatgagactatagatgtagtataagcttgtacctcgacatcggagctctacggatcttcccttctggcatcttaactctgctaattgcaaaagccacggtaaagaatcgacagggatccaatcaaaccgggagcctgtcttaacttgaaggtcatttaagcacaatgaaaggtaggtaccagggcactcgcatcattgattggcaatgatccttgtccgtcgcttgccggaggttcctctaatgatcgaaaatcatcccggtgagcctgatcacttgtctcaggattctcccgacaagatcactgtcatctgctggagtaatcgtcgagctttctattgcagtctgaattccactgtggtctcacttcgtcttcagaagttttgtcattcgtgtgacagtaggtttctcccccgtgctattgatattatttggtcgtttctttcctcagctctccttggtcattccattgatgtagttctgatacaacgaggtgtgaaccgttgctgaatctgtcctctatagtcagtcatcgattgatatcgccacaaagccgcaatatctagtaagaatacatgcttcaattgtggactgttcattgaatgaggcagccgatgggtccattgtctgaccaggaactgatatgtaaaacagaaatccacttctaacttaccaccgacactatggcaccaaccaaaatagtccatcacaccaagtccgcatccctctctctccattcgattgtcgaaagaagcggccacaagggcaactgggcgaacaggaatcgcggggtagtccttgtcttctgcatcgttttcctcgttgtgatgggaatcttggcactctttgcataccgacgaatgttaagacggaaagctgaaaaggaggcctatgaaacgacgagtgattagttcatcacacactctgtgctctcgctataccaatttccattcaactcggtggtggacgacctgtgtgttctgttaaatttgagctgttgggatgggctgttcaacgctgttttgcttgtttgtgtctacgtgatggggctggtactgaatgggatgcctattggcagttcagttacgagagaatggcatggatgatgctcaaatgcgaaaaacataaactacttaagagttaagcatcaatagtaatcaataatacgttcgagttggtttcacttgcaaaaaactactatcgccctctccgtcattcctgcagttgcaatgtgcacctgcaacttgtacagaacttgacttttcccaatgacacccattctcatatgtgagaccctttacttctctagatattttccacagactatcaccattatttgtccgatcgtgtcagatccttgagatgaaattatgagttcagaagcaggcccgtctggtgttcatccaaccgatgagaagggaaagagaaaatgacccgagtcgcccgctcaagacctaacatctaagaaggtttcacttaaggtgagaggagtcgctgctgtcagagaaccacatattcaccccgagaagcaggaagaggatcatctcctggactatgtagacacatgtcccaaggggatttcatctcaatatccaaaccctgtgaatattggtggtacggtaaaatagaaactcttcccacgcggcaacagctaacatagaagagaaaagtcaccgtggccaattgaagcaattgccatgaattatcccacgttcgatgaccttggtaacttcaaaaatttcgtacgtgattcatgatgaggcagagcttgccgtgtatcttggactgcagcataaacacgacctcaggcaattcgctttttcctggccttttattaaggcatggatcagagcaccgcataatcagactatctcgctaaaattggacataaatcatctcatcaagggtggcaaagaactatcctgtatcgaagatccttaccaagtttggccgcaactccccgaggagtcagaggatgcttctttgcgaattacacacatcatggcatggcatctacttcaggtgtctaaggatattgaggagtacaccatgagcagtgatctgcataacttccaccgcacaaggagataccgcggtgaactaaacgcgatgttggagctcgatatcccgctggacaacatttttcatcctcgtccccagctaatgtcttggaggaacaagctggacgacaaattcgatcggtactggacaatcttggggtatgtttcatagatttcctatatggagtcctgggaaaaagcccttgagtttttcgcctcctcagaaaacaaggctaccatatacgacagcaggatgccgacaaagaccagaccaagacccaaccatcttaagttggctcagcagtgctcctcttctctatccttggacagatgtattgaaggcctttctccaatttaggtaaaggtaaattgggacatggaccaaaacacatatgagaacatgaatctgtgccaagtcctcgcaggtatcgctcatgagggtaaactgctccctccgatggatcaaatgatgacacaagaccctcgatgatgcaggactggtgcatcattctggggcataattcgacatatgatgtcttgtggtggctatgcattgaatttgtgtgatatgacgttgtcgtatcaagcggagatggataactgctattatcagatcgacgctttccgatcacagtggaaggtacttcaggggatataaatgaaacgaccgaactaccaccggtgtattgaatacaacctctcgatctcaacctgtgaggagtggcttttactgaggatcctttggcagaagcactcgtctttggttttgtctgtgacttccattgctattgactctctcgtttccttctttgtcgcttattccccgactcgataatttgccttgatgcaagctacgactctcaatgtatagtcggaggaccgcatagctgatcatgtttttattgctttaatatatatattcttagcccgatgggcttgggtgaatagaaatgttctcttacgcagggctttccaacaactgactcgctcatcacctagtccatattatgtacaaaaacctagaatagcatccttttacatatcaaaaaactggccgttggggctccagttctttatttttttgatattggcttgtatgttgtaaacatttaggggtgtttttatgtggagcacttgcgaaatgttcaaattatgcatgaggatgagctagatgatacaatccatacatctcccgcacttattgggataaattcggacccaatatgtacatttcatacgataatttgacggggattttgacgtaagaatacaatataggctcttatacctctcgaggtctacaaaagacatcatcgcaggtagccccacaataaataccgcggggaactttgagatttccttcccacgcgtcaatttctttctcgcacgcgttgatgctaacaatctcgatgggatctcccgaccaagtatgcgcttctttgcgcgcccagattattgtggcagaagcacaacttgctgggctcaaacgcgaccttgcaaacgccgaacaagcagcgcgatcggagaccgcaacgattgcagaaacccagcatgaggaggaccagaatggcgaagaaagacgatggccattgcttcaggaagaatataagcgatacgggcgacaaatgattgtttcgcaagttggcttgaaaggtaagatacggctacgttttggcggttggtttgagcagtaggactgatggcgatttcaattaaccacaggtcaacttaaactccgatcggccaaagttctgctcgttggagctgggggtctgggatgtccagctgcacagtatctcgctggtgctggtgttggcaccattggactcatcgatggggatacagtcgaggtgtcgaacctccatcgccaagtgctacaccgaacgaagaatgtgggaaagtacaaggtcgatagtgcgattgagtctttacgagagtgagtggatccggataggagtactgagctcggcgctgacgacttcttgtggcattcaccagactgaatcctcatcccacgtatattgcccatcgcacacatctcacacctgaggaagcacctacgatattcaaggactatgaccttattctcgattgcacagataacccggcgacgcgttatctgatctcggacactgcagtgcttcttggaaaaccattggtctctgcgtccgctctgcgcaccgagggccagctgatggtgttgaataacccgccccgaccaccgggcgacaagactggagggccatgctatcgatgtgtgttcccgaaaccgccaccggctgatagtgtggtcagttgtgcagatggaggtattctagggccggttgttgggacgatgggcgttctacaggccctagaggcgatcaaagttattactgcacccgaggttgatggaggttcaaattcgactacagcttctccacgggatcccccgtatctccatatcttttctgcctactcatcgcccctattccgcacaatccgtcttcgttctcgccgggtcaactgtgctgtgtgctctgccgagccaacggtgacactagatacaatcaggtcaggttcaatggactatgtatttttttgtggatccgcaaatttaccctcgctacttggtcccgaggaacgtatctctgcccgagaatacaatcaaagacacccgaacgtcacctccgattcgtcacagctccacaccataattgacgtccgagacgaaactcagtttggaatctgcagtttgcagaatagcatcaacattcctatctcaaacatcctttcctcaagttatcccactgcgttacagaaggctgatgatgagcaacaagctgcgcaagtaccttcttggctaccgtccgaggttgcatcatccgagtctacaaacccaatctatgtcgtatgccgtctaggaaacgactcgcagattgtcgtcaagaaaatgaaagaattaggactagatcagcatgggaagagattcattggtgacatccgcggaggactccgatcatggaaagaacaagtggattcctcgtggcccgaatactaactcaaccagcccgctatattcccacgcggaatctctgtccaaaactcatatattgtcctggttttacccatcagccagcctccaggatccacccgcctcacagtcaatgatgttgtgaggattaccacaccatggctctatctatatccaccaccaatcagtgcgaacgcgaccctcatcgaggttaccgagtgtctggaaaacaccacggctgacgtcgatgtcaaactcatcacatccctcacagcgatctactagagtgacatcaatacccctgtcaccccgttggatgtggatcaacctgccacaaagtgcattgtggttggggttgccgtctacattcgcgcggtcaaagacaaacacgagagacggcacagatgtggtctcccccgttattagaccagccgcaggatccaaccccggtctcatactaggttagatcaccgtcaaatgcctgggttgagacgggactgtgtgtgttgttccgctggctaggacttggatcagagttagcatggacctcgatggatcgtgaatgttaaaacaggaagaggaatcaaaaggacgggcaagtccgggtctatttacttactcgccgagatcatgagaagtgatgctttcatgaggatcaacgggagcgccaatagcaaatcccatgaagaggaatgccatcatggcaatgtcgaaaattgggctggatatcattgtcgggccatctccttcttgctttccagcaaagacagtggttttggcagtaaatctgaaactgaagcagggaggtttcaaacagcggccgaattcgctcggtctttatatcatttctttccaggaagagttcttatgctcggacaatgtgtgtacttacgctcatctaaatgccgcggagtatcagaggcaagagcaaagaaatcgatcggagtaacttgaatgacggagtgagtggagtgttttgatggaattgttaggctgtcgccatctgtatatcggaaacagagcagcactgattttgaacattgtcatctatttcattatatccattatttggcgcaatcttcctttcaaaatctcttatagagaccgttatccagacctcaggacattttcaagcttataatgtacgaaaaatcggaagatcggaggaagcaacataaccttaaagggaggaatacactcggcgattcattcggcatagaagacactttagatagttaggacaactttaggtgtagttccgtgatgtgtggtctacctctacgttccacataagtaagtccttaagatttaccaccttcaagcagagctgttatatgtcttccctgatttaatatctacttgggtcctactttgattctacaagagaagaactttgagaaagatcgcataaatctggagcaatttcaagtttggaggttccaccatctaccattgtcagtactttgtattcacttcacggcgaaagtcgacggttttcgcgaattcacgccatatggcctgcataccttcggtctcaatcccgaaaccgtgggtagcggggggcagataccggatggcagactgatccatagggttatagccaataccatcagctagatgtttagggtgaaagcgaaagataccaaatatagcaatgttattgagtctctctgacgaagctgagagagtccacgggtagctagcctgactagccaagcatcagccaggcaccaataaggcaccaacatgccaagtttactcatgcggagtacatcctcctcccccacatatggcagccaatcacaccagggcggggtgtactgcaggatcggcatttcaaaccgactcctttgctctttcgcattattcaactagacctggaggtttctccaaatctgtcacatttcctgaactctaccattttcccccatttctcagatccatgattctaaagtcacgtgggtgatgtcaaaacaacgctcctgaagattcggatcttttgtttttgttgctgagccgaggccactgtgtgacggcggtaaacatggcgaaccctcaaactcatcagtcgggctcatcctttgggtcaatgccgtcgcagcaggatgctcaagatgatacaagcaagaggaaaacgttattcttcggtttcgtcaaaaaaacatggcagaagacgggcttggacagacccaccatcctcttgatgatgaagtgagttcaggaccaagcctgcaatatgccgcagttgaaatctctaacagccactataggggcggtattccaccaactatagccatttctatgtgagttaccaacctcagaagttcccggtctgtcagaatcagtctaacctttaatccagctaccaatccatggctgttgccgacgagtacacgactttaggctatctcgtggctatcgtctcgattctgggctttgcgatcatgccccgcgcaaagtttatccaaatgatgatctttgacctcttggctgtctctatcgcagcatgtttcgccctgttgacaatgttctccagtgtccgggcgcgccaacacaccgctactgactctactgatccatacaattcttccgcgtccgctgttagctgtttgtggctgttctttcaaatctggatggttcacaccttccgcgccaaaaacccacagctgcagttccccgtgattatttacgcgatttttgcaaatattgcttcggtatacgcgccgcaaatgaagactatgacagccgcgttcagtatggtgagccaattgctcaaagccttcattactggtctcggtatttcaacagcgacgtcgctgttgatccttcctatgacgtcacggcaggtcgtcttaaaacaaatggcgagctacattggcgggcttcgctcgggcttgcatgctcatgctctatactttcaatcattggaaagggatgacatgttcggtcgcacagagacctatgatgatgcccgtgaaaagtttggcaaaaagggaaaggtctacagtcccgaggcagaagcaatccgtggtgcagtccgacagatcacggatatccacgctaaactccacggcgatctcacatttgcgaagcgtgagatcgcattagggaaattgggaccagacgatcttcaggcgatcttccgtcaccttcgccagattatgatcccggttgtggggctgagcttcgtggtggatatctttcagcgcatgtcagactataacagatggaataagcccattgatttaaatgagcctgtagtcccggaggatgtccgacggcgggtcgtgcatgagtggaatgagatcatgagggcggtacacgatcccttcgctgtaatgatccaaactattgacgagggattactgcatacgtcgtatgttttcaggctaacaaagacccccaaacgcagagctacagcgaaatctgaagatgacaattcaacggagcaagacaaagatgtggaggccagagccgataacactgctcctggtgaaaaagcatttatcgagtattttgaaaagaaacttcgcgaatttgggagtgcaaaacgccttgctttgcagacatgggccgaggagaagggtgtcacactcccgcccgactttttcgacaaccctgcttctgctgaaatgccgaccgccgatttgctggatacatcagctacgcaaaaagagcgaagccagcggcagctgtatctatttctctacgtaagcctttgctgtttacccgcttaatatgcccgaagctaacatacagtcagatggaacaattgctgtactccaccggtcaaactgtgcttgactttgtccgttatgccgatcatattcaggcgaaagggaagttatcaaagagtcgactcatcattcctggtggtaagcgcgtgtggaagtgggccaggtcctttttgaatccggaagaccacgaagatgataatatgggtgacattcatacacaaaacaacatcctccagcttggagaggcttataaacttcgtaaagacccggagcatctgccaccgactactagttttcagaagattggggacaaaattcgtgtcattccatggtttctgcgctcgttcgagtcgacctatggcttccgtgtcgcatgtgccaccatgactattgcagtcatcgccttcctacgtgatacccaaaccttctttactgcgcaaagactagtctggggtttgatcatggtcaatctcagcatgtctcccacctcgggacagagcattttcagtttcgtgttgcggattttgggtacattccttgcaatggtagccagtcttttaatctggtatatcccaggtaaaagtatacctggaattatcgttttcctgtttatctttgtctccattgctttctacatccccatcaagatgttccgcttcagggctgtggggatgatcagcatcatcacgacaaccatgatcgttggttacgagcttcaagttcgccgagtcggggaagcggtcgcgacatccaatggacagacctattacccaatatacctcttggcaccttatcggctagctgttgtggcgggcggtatcgctgtcgcattcatttggacgttcttcccatatccaatatccgagcactcagttctccgtcaaagtctaggagcatcgttatatcttctggcgaactactactctatcattcacgagacagtctccggtcgcatgcgtggtgacgagggcgaacgtttactcaagacatctccgggtcgcaaacttgagaaagcacgacacaaagtgttcgcaaaacagatgcttatgctagccggtttacggacatactctggattccttcgatgggaagtcccggtcggtggtcggttcccaaaaaagcagtatgattcgattattctctgtgtagaaaagtatgttatgtgcccccacagcctttctacgtactaatagtccttatctttctagtatcgtgaactacctcagcttgctaggctacgcatctgataccatcatgtatctcggcgacggcgacaatcctacagataccgcctggatgactgattttcgacggctgttcaatgctgctaaagtgacgacccacgaggtcacatctttgctttgccttctttctgctagcattacaaaccgtcaacctctaccgccgtatctcaaagcaccccgtccttatggcttcgcgaaccgcttgaatgaacttaacagtgagcttctaagcctccggcacattgcggagccgggattcgcggcttttgctgttctacaaatttcgacccgttgcattgtcggtgatatggacagattactgcggtaagctttcaatagaaatttctttgttaaaccaggccgggcttgctaacagtgctattcattctaggcttgtcaagggcttagtgggcgaattagacttctctttccatgctgtaagcacaggagagtcattggctgagtcgcgagtgacttctcgggtgggatcaagggtggatttgagcgggtacgcatcatcacaacctgatgatcggcacaaaaacgattgatgtattttttttcctttttcgtctcttcactcttcatgataggcagcttttctgtacatacatatctggacgtggcatgtacataatgagatggcggacatcattatatcattctttatcaacgcagactcgtacaaatcaccgcggttgatttccccctcaacgataccccgcaatatgcttcgccgcagtcggatcaacatcaccacataccccgacttgcaacagacgctcacttttcttttttccttctcaattggggtgcctccatgtaaaaaaaaaaagcaaaatgaccgaagtcaaagtccaccaagctctcttcccccaatctgccggtaaaacagtcctaataaccggtgcagcccgcgggatcggagccgcaaccgcgatcctattcaactctcacggggccaatgtcgttctcgccgacctcccgcagctacgagacagcgccgaagaagtcattcagaaacagatggaattcccaaaccgtgcattattcgtatctaccaatatcatcaactgggcagagctaacagcatgcttcgaaacggcgattaccaccttcggaaagcttgacatcgtcatagccaacgcgggtattatggagtctgaggcggtcctggacatggacaacgtggatgcgaacggacgtcttctcgagagcctggaggcggggagggtaattgatgtcaatctaaaaggaacattgaacagtgaattaccccgccatttgcaaccttcaatcgcaagttgaaacacaattccagctagctcacatgctgacagaatgcctcctcacctaaattagctcttcgcttgggactacactatacaaaatgctccacaccacccacaacaagcccccaaccgacaaagtcaatcttgctagttgcatctacatcgagttatttcggtggtaccggtgtagccgcctacgtcgcgtcgaagcatggcgtgctgggccttctacgggcgtgtcagaatgttgcgcgcgtacacggcgtccgggttaatgctgtcgcaccatttttgacaccaacccatatcacggcgggctttgcgcgcagatgggatgaggctggacttgagaaaaataccccggatcgagttgcagatgctattgcgttcatggctttggatgacaaccgggagggggagtgtgttttggtgagagatatctattgcaaataaggaactggcatcgtgctaaatcgctttcggttcgcttaggttgccggtaagtatctccgagagctcgaggggccaagggcaaagctcttgccttcgtggttgggggtcgatcttatggattttatgggtcaggctatgcagttctttgttagtattgggggatatgtcttgcccaagaagtgctaggggtcactctctcttgcatcgcaaagcaacaaaaatatggtaacggccctgctagacttcagggtggcattatagaggactatccacatcaaggttcatgctgtgtcgatttgctttgctcatttactattgttccatgtactggcactcgaaggtaaatcggaattgcgtgatccccaactcgaagtacctactgtagcattatgccaataatctgactaagaagaccttagaggaataaaagcatgtgactcctcaccatgatctactggaaaacgaagcgagccgagccgatctcgggagaatcccgggcgatctagcggtaaccggtgattacgtactccggagataagggctccaaagctccaaggctctgttaactaaggggattttctgttttccataatttgactcgcgatggtaaccaggggactctggaactttcatgtcgatggtaaggacttcccctgaccctgaatcaaagattattaacatcgttatagggaaatggtatcgttggttccaccctccccgtggacagtcttcatcctcagacacaccgacaacactgaaaaccatccaccgaattctttcgagaaccgacaagttcgaatgaaataccgtcccatttccgtcaccgcttcatttccaactgaattatgtctatactattgatgaggatgcgggtcattttacagtcacccagtgactctatactcgagcgtccgacgtgcagcattggccatggatgatgcaaatgacgaaaccaatgtgcaagatctattgaactcattccaaatcaagcaaagtattcctgcacggctaaacgagctgcaatttcaggtctttacagacttcgtgtttacatggcggttctattttgacgacccttctacctggggaagctcgtttttcatcttcgctgcccttgctattgaattattacgtgtcgcagcatgggacgttggggttaggaatatggataccgaggagttgcccgatcacattttcctcccttccacaatggaaagcgcctgctgagaacatattttggttccacaattatctgatcgtgtgctgcaacaccgatcaaatcggcacctctatggctacaaaagcaaaagattttctatcccgcagtagcaagcacacaacgactgttcgtggtatagccattagcatacggcatatcgcactttttgagatttgcaatggcgatatatctcaatcctcccctattaccctggttaccaatacttcagcactgcgctgctcccctgagtttagggtattggcttatatcttcacctcaaatcgcccgaagggctttttggcagagtgcggagagtgttggagggttacagtacccacggagctttttgacatgatcctcaaggcatccatgccgagggatttggtctcaatggcacaagcgtcctttttggttgagaaatggtattactcttccattccccaaatcggtgccatcagcctacaaaatttccccttctctataccatgttgcggtcaatgagataagtcgggtgcatctggagtctactgctcggtctgctttacctggtcacatatggaatgtgcagagctatcttccaatggtcgttttgacactgataagtatatctgtcctgattgtcaagagaatagatcctgttctgcccttgagacgggtggtgttcaccaaacctaccgcgcaaaacgagtacggaaagcacgcagtgtagttcatggtggcaaaagtacggatttcctgttgcgagtttctaagccatcctgtcgtcggccagagttatggctaatcggaaatcttggcacgcctcctccactaaacgtcgattatacgatattctttagtggagtattttctggtctcgcgtatggatttgatcaatagcacgattcatttacatgttaagggggatagatggcagactgagtacaaaataaaagcttgatcttgcgtggaagttgacgtcgtggccgtgtgggttattagtccacgtgaggttagaatcccgtatcctcaccgtctccgagacgaagtaaccctcttctcgaacctccctcttcttatcttttagataatctcatttggtgtatttattacttttctagaatgctctgtatgcgtgccgcaccggaagcagaagcctgtcaccttcccagttctgatggcgatttcaacaaggtgttatagatgccaaccaccatgacttactgcgcccatgcaatttgtcagcagactatattccagaatggactggatttgaaccactccaagagcctgtgggtaactatctctgtgtgtttgtcctcggctagtcatatatcctttcggcgcggatgatagagctacgcggagaacaacagatgataaggttgtgtacacctagaaccatgcacaatggaatatttgtgaaggagagcacgattacttcgaccttgacatcggaagtaatgatattgccgaagttcagtggtgggctgcaatccttacatgcggacgtggctgggaggaaactcttgctcgaattagtaaacactactatccgccatgggaatgccatttgaacagcagttcatttaaattgcatcattgcgcagaaatgtcatgctcaatttctaccgagccaccgtctgcagcagaagcccaggaatatctttgcaatttcgcccgactctatgatgctttcgtcgacgggttgccattagttcagaaatattccttgccatagctgaacccaattcttatttgttcatgtcatgtatctgcttgactttgcgcgctgcttgactcactcaaacacgtgaatgacggagacaataccaacagtattttggaatcgtaaccatagcaaggtaaataatcatgcgttttaccaaccgtccacatgtaagttccacatttcaggagactcggcaagacgtctcccaaggagacgacccacatagaatcaaagtcctgactagagatttggagaaatatgatttgggtatgtaacatgtacgaaggggagtagaggagtgtccccctgatagcggcccctgcggcgagtagccttcgcgagatgagcgtggaagtagccgtggacatctattcgcgtgagacgttcaaaaaggcctcactaattgcgatcaaattattgggtgcttttcagatttctgtacctatgctttagcagaaacaaaataaagtcaaagccattacctggggtttccctgataatatagcttatccagaatttctacacggtgccatccaacgacacatttatatacggattttacgatacaacctgaatatcaaatgacaaggtaagttctgccaaattctcgttcacgaataaagactccttacgtcatccacggaatgcttctggggtcattgcacctaattatcacgacagccaacaaggggcgaggaggctggaatgcagtatggtcctggcgccctttaacccgtcattcttaagggtcaggctctaatattttccgcgatagaaggtttggataacgaaagatcacatttaggcccaatagcaatggagttactatgtatcccttcttttgtggaatccgcctaaacgtctccattgcaggtttcccgacgacgaaggggcggacagggacctcctattacacaactcttctatcccacgttgatgttggtgaccttataatgcgagctatgaaattttctgcgagaattgctgttcagtttcgattgatgccgcagtcgacctcagaaaccacaatatccaggctcctgcgacgaacgacagtttagcgacaagtacatattcttgcaagaatattttcgacggccaatatcaaatcaaatgggacgccgttcaatagccgaagaaatttacgataatgagtcgaaaatcaacttcggcgtaccggacagtgtccgaagtttggacggtatgacgcaaaacccagcactggggagctcaattcaactgttcgagagcgaaccctcagccgaagaacaacacaggcgatttcaagtgcgagaatggttggtctttatctgtatcgtgatcctggcaatgatggattcgttcaatgcgacaatcttgatcccagctttgcctgtatgtcacatgcaatacacccgtcttatttaacatctataacagagctgatcaaaccctcaattcaggacctcgcaaacaaatttgcaaagccactagcaagcacattctgggtcaacacgatatacctcattttcagcgcaagcagccaactctacttcacaatgatgagcgagatcttcaaccacgggcccatatggatcattgctgtagtcttcgcaacaatcggcacaggaatctgctgcggctcaatgagtctcgcggaactagtagttggccgcatggttcagggtattggcggcggcggcgcaatgagtctgtgtttcattgtaatgaccgatacggcgcctgaatccatgcactcgcggtattcatgttatattctgctaacgcgaatgtgtggcggcattctcggtcccgttatcggcggcttgtttgtcgattatgcagactggcggtgggcattttatttcaactttattttctgcgcgctgggtttgctggctattccgtttgctgtggaccttcgcgcattgagatatatcccgatgcgtaaattgcgcgttttggattggacgggtgctactttggcccttttaggtcttggggctctcctggttggcctttcttgcggtgggacctcctatcgctggaaagactggcagacgattgtacctcttgcggtgggtgctgtggttcttctcgtgcttctgctttatgagtccaagtgggctctgtatccgcagttcgggaagagagtgtttcggtcgaggatgatgactatgacacatctagggtgccttttgcatggttttgtggttagtagacgttttccttgcattcgtttcgtgttctctgacggcagtccaggtttttgctcacttgcaattcttcccattatacttcatttccactcattatatgtctgccactttgtcaggcatcaccttgctagccatggtggggcttgcaattgcgccggcctcggtggttggtgtcatccttgcgagagagttaagatgcacccagtggatcatctccggtggttgggtcttgacttcccttgcgagtggatgctctatccttttagatagctccacgccgaccgtagcgtggatatttttgctattcacagcaggccttgggcatggtttgttgctttcgagttacaatgttcgcatccagaatctacctaaagacaaggatgattctctgccaactctaccaacaaccatgtcatactacatgcgatcctggggtatggcagttgcggtccctattgggggagttgtgttattaaaccgcttcgccaatggatttggcagtgttgagatgaatcgcgacatagtaaactctgccaacggatatctcattctgatgaaggatgtgagcatgacaagtagacagagagaggcggttacaattgtttcggtcgctgcgtttcaagcggtatggggtctcatcacgggtgtggctatcttcgggggaatttcatctggtttcctgtggcgaaaaaactgaatgtgaatatatagtatgtgtcagaattagaagacattggatttgtcgcaacacggacatattggagtagcacaaaaagctgacctgacagagtataaggaaggatatacaatgaaagggcaaaaatcaacgtaacatttgagctctggtaagaatgactcggatttcaggctaaaggctaatttgacataagaatgaaacaccatttctcagctagcggaaggacaatcaggctggcatgggttgctccgtgatcttcacactttctcgataactttcacccagttggcttttatacttccggaatgacgaactctcgcttccctttgattttccagccagaaagcctgtctttaccaagcatctctagtgttttcttctcgaccatactgtatttggagggatcgttccggtcaaactcgaacggctgcttcaaggctactggtgggttggtgataacgcgtggatgtctcaagctgttgacagaaatcgagtgacacatgaaaggatggagaagaatcacatcgcccactttaccagtcatctggcagaaatttgtgcaattcctaacgatatccgagtaaaagggcgtatctgcggggtttccaataggctcttggccacggggatacatatacggtgtcacgccctcaggatgcttgtactagaaacttgagtcagaaatatccaaaagtggaacaggaggcttagttacataccaaatgctcagcaacatatttcatcgcctcaggggcgaccatagtgccacctgcacgatcctggatatctgtaaatagtggtgtaatgagcagggcctgttcaggcgaatcaagaaaatgcgtaaagaagtcgccatcgacatgccatcccggtagatcagcaggatggggccatgtaccctcggattcgggcaatccaagattgacgatcaaggcatcgtcccaagtggctgattccggggctacacggtcttcgccgccgagaagctcgcagatggccgcccatgccttgggagcgaaggtcctgactggctcttctttggtgcctcccatgtggataatttcggttgtccaagtcgacttatctgttggtgacataccgagtctagtccacacatcacctgcccattcggttgctttctctcgcgagaaacagtctggtagacgcacgtacccaaatctcatgaagtgatcgatctgctcttgggagagcttgtatttgggtttagctgccattgtgtctgggtcctccaaagtagagctacagcatgagcccataatttaagaacgagggacatgatttcgtgcaaaagtggcagtttggccgttacctacttgaggaaggtgcttgctgttatgtgattggctccattattctgccgatcgctcggaccggaccagtgataatccgtcccttcctgccatgactcggctgaagaaggaagcggtgaactcgggttctcctatcatttgatatttgtattcctcttcttcaatggcgtctgcttgcagatgaacaatattcattgtgccattattcgcgtaataaatggccttgccaagatacgaattccggctaaacagtcaaatctagttagtgcatgaccccgcaaataaagaatgctcccgggttgcttggcatcaccactcacaccacctcatttcattttctttcaggtggcgtccaggctaatattgttgctcaattcgacacggagcgtgtcagtcggatcctgaacgtgtttggcatacagagatccccaacacgaatcacccggaacctggaacaggaacagactaaaagataacacctgacccaacttatacctcgaatgaacacggagggatatcaattatgtgcgctgccttccccggatttatcaatttgtgggcctcggcccgtcttacctacgattgtggggccgaacggcatttgtctcgtctctaaaggacggaccatgaacacgcgctacatacccaagtacctaaataagcgaggcagttgagatcatgcgactaggctgctatagccaatccaactgtaccgaatttttaaagccgtggaattagcctgggcgtaagagatggaacgttttcgctctactagcatccccattacggcaaggtccgtctgccatacctccaatctggttaggctgtgcatggatatacgttcctaaccccagcgctacacggaacccattctagtgtcttgggaacgcttgagtttctttatttttatctttcccaatatgtgttttgatcgcgaaaactagggagagctgtcgatccaagcaactcagccaagacatcaatccccagtagccggttaatatcacagtttattatccccaatggcaaatatgaatagcttaaaaactccagcggaacccccctatctccacatttctctgccttgttctatcacaagttcggtggacatatcacctttttacccatatatttcagataccgcattcttctaggtagactctacagacatcatgggtattgctgtcggagcttcgactctgcagtccgatttggacgcgactcaagctgcaaagcctgagttagagaaggttaactggtggcaagagcctggtctccgaaagctttattgctgggctgctgtgctttgcatcgcttctgctaccactggatacgatgggtaagcatcacagctctgtggttggatatctatagagctgacggggccttctgtagaatgatgcttaacacctctcagaatttggatacatggcaagtgtacttcgacgaacccagtggcgccacgctgggattgatgaatgcaatttaccagattggtagtcttgccagtttcccttttgtgtaagtttccttgcactgaataaaatgcaagctcgctgacttgaattaggccattcatcgctgatcgatggggccgcaaaattccaattgtgatcggatgtgtcttgatgattcttggtggcttgcttggtgcattctgcacagactatggaagtaagcttggtcattttatatccgcccgtggtcaggtcgttatatttactgatcctatttagtgtacgtcgccggtcgactgctcctcgggttcggaaacagtctggcccaaatggcatctccggtgctcctcactgaaatctgccacccccaacatcgtggaaaggtcaccactatctataactgcttgtggaacttgggagcactaggtatggatccttctagtcagcctccggacactagcgtgctaattgggtctagttgtcgcatggcttgcatggggaacgatgtatattccgaatgattggtcatggcgcagtttgactctgctgcaaatcttcccggctgtcattcaaatcgtcttcatctggtgtatgcttcattttactccttatcctggatttaatccagtggctgaccattattaggggttccggaatctccccgttggctcgtatctaaagaacggtacgaggaagcattggacacactcgcatattaccatgcgaatggagataagaacaacgccactgttcaattcgaataccgcgagattaaggagactatcagcttggagatgcagttcgagaagaacagcagctatttggacttcatgaagaccaggggtaaccgttaccgtttggcacttctaatttctctgggaatcatttcccaatacagtggcaatgccttgttcagcaactacaccaatttgatctacaacagcatgggcatcaccgaacaaacgaagaagattcccgttcgtgaccccttgccctttttttaaatgactgctagcttacgttttattcatagctcaacggtggacaaaccataatcagtctaattgttagcgtttcaagcgcattcttcgttgaccgagtcggccgacgacctcttttcctgatttccacagttggtacgtagcagtacgctccacgataaatttcaaaggctgacttatcaactctctcctctcaggcatggtcctcatgttcctcgcatggactgtcgtttcctccgtcttcgaaagaacccaggatgtcaaaacaactggctacccacaagtcgtcttcgtctggctcttctctatattctattccattgcctggtcgggtctgctcgtcgcatatgcgcttgagatcttgccgtaccggctgcgcgctaagggtgttatgattatgaacctgacggtacaggcatctctggttctcggaaagtaagttgcctgaatatatgtacccgctctttggacgaaactcaccatcttagttacactaacccaattgcgtgggagaatcttcctcagcactggaacttgtcgctgatctacacggtctggatattcatcgagctctgctttgtctacttcttctacgttgagacccggggccccactctcgaggagctggccaagatctttgatggtgatgatgcccaggtggcgcatgttgatcttcaacaggtcgagaaggaaattcagattactgagaaagagtcgcaagagtatagggaacgtgcgtaattgtgtcgttgcggagatatattcgtgcggcatttcagtgccgattgtcgtcagataataatatatttgcttgctactcatgaatcaatttgaaatattcaggtatatttaggcacaacttaagttgaacatcaatatttaataattaatataggatctacaatactgccccgcaaaatcaacaaatgagagagtgtcccgggtggcatactgcctcattcgaaaatcttcccgaccaccttatccaccaagccctgctcgcgcgggatgagtgcagcctcgtattggtcgatctcctcctttatcccgccgaggctcaggtccgcggtgcccggccacacgtagcggctgcggaagacgatcttccagaagaggaatagcacaatgaagaagccgatcatggcgtagtcaaggcagaaccacatgacgtcccaaccgcccttgatgaaaacgtcgtagccgccggccagcagcatgaagagcgtgccgcccatggcgaagtaggacgtgtacggctggaagcggcccttgtagggcagggtgtcgcgggagataccctggcgcttgagagacgagaagaagtgcctgtaggttgcggccgtgcagaggtagttgataagttggcagcaggtgacgaggtcgacgaggtagttcatgacattggccgacgagctgctgacctgcaggaaggcgagcaggcagaagctgagcgagaagagcagggcccagagtgggacaccggccttggtacaccacgagaaaaagcgcggggcgtggccttcgagagacatgccgtgcagggtgcgggttgccgagaagaggaggccgtttccagcgctgaagatggacgtcatgataagcgcgttgacgagggagggcagtccgttgatcttgagccgctgcattgcgatgacgtagggcctgtgcaaaaaacattgttaggataagtgattatggggaatgaacaaacgctgttgagaagacttacgatgcagcgccagtacctgatccagtgagtgaaccaccgagaatacccatgagggtggtatcgttgtacgggatgacgatacccatacaaagggcagatcccacgaagaagagaagaatgcgccagacgaaggaccggtaggcagggggcaggatcttgcgggggttctcagtctcagcagccaccatagagatgtactctggaccgcagattctgtttttgaaaacggtcaggtcccaacgcacaaagtcatactaagaggagttgggggcgcggctgtaggtggcaacacttacgaaaagctggcttgatacacgcaggataggacgcccaggaatttgcccgtccctccggacacgatgtgttcgacaaaggcgcccgggtgattccaataccggaagccgtagcggtcatgcagggggttgccgcccagcatagtgatgaaggtgaagaagaacagccccaacatcagaatcaccttgaagatggacaggtagaactcggagatgccgaagtagcgcacggtggccacgttgaggatagcatatagaacgatcatggcgacaattatggcctcaacggggactttgtcagtccagaaggtgatcataatgttcatggctacaatttcgaagggcactaggaaggccatgttgaggaagaagttccaggccatggcgaagccgagagcgccatcaacccattcgctgccaaagcggatgaagggcgagggcacgggtaggtaagtcaccatctcggcgaagcactcgttgacggcccacatgacggcgccccagatgaagaaggcgatgaagagacctgcggggccacccttggggagagcctggcccatttgcacatagagagcttcaaggttgtcagccttccgtgctaccgttgtgaagcagaagttcttgtcgacttacaggtaccaatggctcctccaatagcgaaaagctggacttccgatcctcgcagcttgcggtgcagatgctgcgaccctgaggatatgttcgcagacatgcccggctgaacatcatcgtcgatcttggacgaaggctccgtggcgatggatggtgaaggagggcccttctcaaaatacttggaggctgacatgttgacgtggtgtattcaatggctcgtcgatgttgagctttggtcgtggaattgaatctcacagcatgccaaagggaccgtctgggctaaggaggaaacacccggctaaatgaaggatccaggtcgggcaatacgcaccggaagctggggtcgaacaatgacactcagagccgggggtggctaacatcgtggcccgctacatctctcattgtaatgtgagataagagattggtaggattacctgtgggaaatctgccctcgggagcctatttagatagcggcccctccttcgcgagctccgagtgggctgcaaatctaattgattgctcttttagaactagaatcagcactaagataactaaattgactggctttgaagactatctcgttgattataggtggcgatttgcgtagtcactctaacagctatcgagatacgcttgggccgaggggtgatcgttagcatatcggcatgtgtggcgggggaatttgtggggcaacgtgacctctgtcggacgctagtccgcccctgtggctggatggcttatcggttatcgcagcactagccatgacagggccacgagggcgtatcagtggtcggggcatccgacgcgtatcaccaccacggtactttttgcctgaccgttgcacatcggacaaaagactgtgcctctgtaaaagatgtaagggcgaggagatatctcagtacatactaccgggtagagacggagcaggtgtgcaagcaagtgcaattaggtgctaatagtatattgtgatcatattattgtgtaaggtgtatcttccaaaagcagagaagtttgagagtgagataattcaactactaatcccgaggccctcgtgatacggaaattggcctgtgcagctgttagtgccgcgctagtcccccactaagtgcccgactcagggttgcatggccatccagcaaactactcatgtatttgctatgagtgcctgtaattgttccctaattcttgttgtggcatgtgctcactgtttgaagctgctgttggatagtgcctcctcgtattggtagtgcggctggaactctacatacaacgtgtcctgtgtgccacgttagcccagggctgtcatcggtcaaaaaaggagtcagtagactacataccggagtgctggccatcttgaagttataagctgcctcatcgtcgctcacgatgtgcttcttgtgtccggcgctgtcagccagcagctgcaccttgcagctcctctccatcaagcagaagaggaacgccgcctcgtccaccgtgtagcccgtcgtcagtaggccgtggttcattaggatcgccgcctttccggtctcgcctaggctctccgcgatcttttggccctccgacgcctcgttggcaatgccgccgtagtctgagtacaccgagtgcgcgttgtagaagtagcacacgtcctggttgatcatctcaagcggccgcgcaaacgccgagtaggcccggccgtgcaccgagtgtgtgtggcagatggcatgcacgtcgggccgcgcgcgatgcacagcgctgtggatctggaacccggccgcgttgatggacccggctgtgttgccagcgacgacctcgccgtgaatgtcgacgcagatcatatcgctagccttcagcaggccaaagtgcacaccgagcgggttgatccagaagcggtcggtccactctgggtcgcgcacgctgatgtggcccgagataccctcggcgtagccctcgcgagcaaagacccggaaggctgccgccatgtgttcgagctgccactgccgcgtctcagcgtgcgtgctaaactttgggatgccggggaggcttttgcctctgtgagccatagaggccatggcgtcgacatcgccgtccattgacttggtaggcagggtggacgaggaatccacgagggctactgttgcggatggtgccattgtgattcagttgtaaaaaataaagtgttgcagagcgatgtattgcaatgtgaacggtcaaccttggaatgataacctgagtagtaagacgtcgggggcgatgtcacacaaatacatacacctaaccttgatcgcaatcacaagcgctctatctccatgataaccccatactattcctatccacactccgcagagccaaaaacaagaggatactagcggcttgcgataagccggcgttgacaagccgacacatgtagattgtcttcgtaatctcaccccgcttggggcgaagactgtatctgtgtcaacccagccattgtcggcctcgccgacagtgcagagctggcacctcaaatcttccccaccaacccgagggaaggcattagagggcatgtacaaaagaaataaacatcacaggacatcgcccagccttggagaaaagttcaacttgtgttctattatactttgccgccttctagctcactcagaggaacgcccatcatggatacgaaggtccaagaggttctcagtccactgagctatcgcttgatccagcttgtggggcatcataatacactgcctgtgctagttgctctgggcgtagtgctagtttcctatgtcatatacaatgtaagacaaaccatgggaaccgagtgtgacatgatgactgacatacaataggtcgcctttgcaaccgacatcccttatatcaaggggctgccggagatcccaggcgcggttcccgtctttggtcatttgttaaagctcggcgaggaccacgccaccgtgtgcgagaaatggtggcgccagtacaaccagcccgttttccagatcaagctgggtaacacccgggccgtggtggtcaattcctttgacgactgcaagaagatgctcctgggcaaccagaacgccgtcatcgaccggcccaagctgtacaccttccacggcgtcatcagcagtacccagggcttcaccatcggctcatccccctgggacgagtcctgcaagaagaagcgcaaggcggccggcacggcgctcggccggccagcgctgcgcaactactttcccatgttcgaccttgagagcttctgcatcgtgcgtgatatgaagggcgacagccgcaacggcgagctcgaggttgacgtgcgaccttacatccagcgttacgcgctcaacaccaccctaacgctctgctacggcatccgcatggacgaggtctacgacgagctgctgcgcgagatcctgcacgtcggctccgccatctcgctgctgcgcagcgcgtccgagaacctgcaggactacgtgcccttcctgcgctacctacctaacaacgaaaagaacgcgcgctcccaggagctgcgtgaccggcgcgacgcctacctaaacttgcttctggacaaggtccgcgacatgatcaagcgtggcgtcgacaagccctgcatctcggcggccatcctcaaggacatggagagcaagctcactggcgtcgaagtctcgtccatctgcctgtcgctcgtatcgggcggtttcgagaccatcccaggtaccctgacgtcgtgcatcggctctctgtgcacggccgagggccagatttggcaggaccgtgcgtacgaggacatcaagcgccacttcccggatatgcgcgacgcctggacagcctccttcgttgaggagaagataccttacatcaacgccatagtcaaggaagccggccggtactacaccgtcagctccatgagtctgccgaggaagacagtcaccgaggtcaactggaacggggccatcatcccgcccaagacgatgatcttgattaacgcgcaagccggcaaccacggtaagtgatcaatcacatgacctttttatgaagaaacacgacgctgacatagtactacctgcagatgtcgaccattacggccccgatgcgggacgcttcgatccagagagatggctcaagagcattgacccgccggccgaggctgaggtcaatgggctcggccacctcagcttcggaacgggctcccgggcctgctcgggacagtatatcgcatccaggcttgtgtacaccgcgctagtccggatcttgtcgtcgtacaagattgtggcgagcgagacgcacccgcccaacacggactacgtggattacaaccagttcaagacagccctggtggctatccctagggagttcaaggtccggctcatcccgagagactcgaacatgacgagcgaatgcttggatgcagccgagcagaggacgaaggagcactacaaggagtagatagacagttcagcatcgtcgttgaaatgtacgtgacacgcagttgatgtagacacaaaaatgaaataatttgaacagtatgaaaagcctcatttccagtcatgtatgatccgtgacgcctgattgattggttggcatgtaggccttttattgctggatcatgtgatccaggtgccttgttactcgatggcctcaaacactcaaaccccatactttgtctatttcatgtgttctaaatctaaaaattcctgacgttttcctctacttctccaattgtacgataattaggaaatactgtacaagtgcaacctcgtctcagagctcgcattattcaacccgtatccagccgtgacaatcatcacaaatcgagaccatgcttcaagaagcccgcgccgcatactgtacacagggcatcaatgctacatcttccgagaccccacctatctaaaacgctcaaatggagtggcagctagagtcccaacgggtcggacagtccgacacgtaggtgcgggcatgtggtcattgccccactgcagcacgccggcttgataaacacatacaatacgaatatacttaggattcgccgagtatcatcaaggtcgggttcactatacacatcatgtcttcacttagcattgagcagcttttcggtgtcaggggctacgtcgcagccgtcacaggagggagcagcggtctgggcttcatgatatgcaaagtaactacgccgaactccgcgaaatgttgcatatatcgataccttggaacactttctgacctaggtggttgtggcaggggcttgtgacaaacggcgcaaaggtctacgttatcgccttgccaacggagcccattgacgagaaggtggcggagctaaatgaaatcggccagtcgacgggtggaagcgcacacgggtatgtttacccaagccgtgtccgctatgtcgactaataacatgtgtacacgggccagattaccctgcaatgtcacggacaaggatgccattgctcgcgtcgctgcctacataagcgagcgagagagccatctggacattctcatctccaacgccggcataaggagagatcctcctgtggcctgcgacgtccttaccgcctctctatccgagctgcagacgtccatgtggtcgtcgcgccactcggactgggctgacacattctgcgtcaacacgacggcacactacttcctctcggtcgcgttgctgcctcttctagcggcggcctcgcagctcgacctaggaggcggccgcaagggcaaggatgacggccgcggcgtcatcgtcatcacgagctcctgcgctagcatgcacaacgctaccaatgtggacttgaccagctacgcgacgagcaaagcggccaccgaccacctggtcaggctgctggctgccaaattcagccgtttttacgtgcgcgtgtcgggcatcaacccaggctgtgagtgcttcgactcttattggattggaaagcagcattgtgcatccatcagacttcatgggtacggtaatggctaattcttcatccttgtagttgtccctagcaacatgaatcccgtaggggaagaagggaacatgttcagctccctgtttgacaaagtacccgccaaaagggcgggtaacgaggatgatattgctggcgcagttctctatctggtcagccgggccggcgtacgttcttcttattctctaaccacaacccttgaaccccgcactaacagctacaggcttatgtcgatggggtgtccctttgtgttgacggtggtcgtattcttcttgctaatggccaagagtaaattacatacatctacaagtactataattaagttgagctgcaacaatactatcttcctttgcagatatatatcgtctccatgcagacattcccgacttccccatattccacaacgcttctctgtccagacaacttcttgctttgctcctgtctaggagctaagaagtggatgccatataagcggtcttaatctgcggggcgcttcggtgttctgtgtcggcattgccgacgtgattgcactaataatacagcgcatccactagtctaatctaactggtagataatcgaatcgctccagtacaattatctgtgtacgtaacttgatatcgtacccaacaaaacaccccatgagtaagggcctacctacgatatatgctaactatgttcactgacaagttaaacaagtgactacttgctgcttgtgcttttgggccatatagaacctgactgcctaaaaaacggtacataagataaatcaactgctgcgattagttccaccaagcctatttgatataaaaatagccgtgccggtggtctttggagtcaagagaaatcagaaagaatagtcaaagatgtcgattgtctcattgtccgatggctcaaggtgaggaattctatttttcaagggtaggcagctgctgataagcctacgatttcagctcaagctttacagcagaggatttgaaagacgttgcagcgcagctcaactttgaattacccaatggcaaggattccgatgattatttgcgtcttctctggtccttcgaggccgtcatgaagcaggtggaagatggatccgactacattcatccggcgctcaagccccaggccctctctacgagccgcagctattggaagccgaaaccagaggacaacccgttcaatgcctggagtcaccggtgcgacctccgcgccgcaaatcccaccagtgatatcctcaaaggccgcacggtagcaatcaaggacaacatatcggtagcagcgctgcccacgacgctcggggcgcccgcatcgcttgtatctggagacgccgtgtttcccatctcgccgatcgacgcccctgttgtatctcgactgctagctgccggtgccgtgatcaagggcacgtctacgtgcgagtgcttctgcgcatcccccctatcattcacatcagccacggggccggtgcacaacccccgcctccacggctatacagcaggcggcagcagcagcgggagctgtgccctagtcgccgcccactcgctggctctggagcaggatgacggcagttgcagctcatggggcgagacggttgagctggccatcggcaccgaccaggctggctcggtgcgcaccccggccgcgttcaacggcctctacgggctcaagcccaccttcggcctggtcccttacaccggcggagggtctatgtcgcccatgatcgatcacctgggaccgatcgcatcccggctggaggatgtcgccgcgctgctcgaggtcatggcaggatacgatggcctcgatcctcggatgacgcccgagtcccctctgatggatcaggtgaaaccgtaccgtcagctcctgtcagatttccgacagcaggtcctggccaggcccagcgatgtaggtcagggctggaagatcgggcttctcacggagtcgttcctcgtcccaggtgtgtcctccgaagttcgtgacaccgttcgcgatgcgacaagaagattcttcgaggcggctggagcgaccgtcgtggagatctccgttcccttgcacagcgaaggtccggtcatctggaccgcatcgacaaggccaaccatgtccagctggctctgccagggaagaccttctggccatctcacctacctgccaccccacctaaaggctaggtggcccccctcgcaggagatgtacgaggtcctcaactcggccaatccggcactaaccaacatcatactaagcgagcgctttgcccagcgcttcctgccggcgggggacgaggcaaaggcccaccgcaaggtctttgagctgcgcgacgcgtacgatagggcgcttgaggagttggatgtgctcatcgcaccgtgcgcgccgactgttgcgatgccccaccccgagaccgtggataaggagggcaggacgccctcggttatagagaggcttgcgccggccattggtttgacgagcaatacctgcccgttcaatgtgaccggccacccttccctgactgtgccttgcggtttttccagccggcccgagcggccggatgtccgtcttcctatcggcatgcagatcattggaaagcggtggaaggatgaggaggttatcaaggcggctgctttatttgaaaggggacgggagttgatatccagctagcttcttttcacatgtttaaatgaagacttgcgaaacaattatattccagcccacatgggatgtaaactagggatgtaaactaatgggcaagtgatctatttctcttgatttgaattttgatccctagatcgactaatccacatctacgttgtcaagaactcggtgatagctcggtccaaccactccgtatcggccttgttgacaccagcccctgctaggtggccccagacagacggaatgaccttcagcgttgcagccgtgatagagccggcttccctctcgctagcctcccagcggaaatactggtcagtccggcatggcatcagcagcacgcgcgctctgattcgcgagagtgcgctctccagcgacctctcgtcatccttgctgtcgccctcactatctaccaagctgctgacgtcgccgctctgccacatgtgcagcatggcaagcaggtcgtcggggttccacccggcatagttcactcccgtcacgtcgcggtcccagtcacccagggccgcgtacccgagcgatctgtatgcctgctgttcgaaccactcggcgctcgtcagccaggcggagtaggccttgccgaaggcatggacaccccgggagatgcccgtcgccggtgatgtgacgcggtccttgtcaacgtagtcaacggcgttctgtagcgccgccttcggcccttcgaggaactggtagttgtgccggctggtccgtgccgaggagcagatgacgacggcgctctggacgaggtctgggtacatcagggtccagtggtaggcgcactggccacccatggagaagccgacaacaacgtcgagcgactgaaccttgaggtggacggtgagaagctcatgctgggcgcggacacagtcgcggtagttgatagagctcgggaaccccggggtattggaggggctcgacgattcaccgtttccgaagagcgctacgacgatgatcctgtgatctcggagcgcgccgtcggcaaagatcgaggtggactttagccggccgcggaaacaggtgatgaccagggcagttttcgacacatctgagtttaggtcgagataggccaggcgggccaaaggtagagtcgtcccatcctggaaggagaagttggggatctcatagagctgggtcgttgtgccggccatctttgtgtgccttgagtgcagtaacttcttatacagcgtctaggtctcggcgcagctgttgttcagagtgaggtgaccacttggtatatttggctagttctagacggcggcattggcagtccattgtctcagctcgcactgctgcactcacccagtgtcaggcatcaagtggaggcttcggaacttggcctgatgatcacgtgtcggacatcccgacgcatctgtaaagtcggatcggccgtcccgacatcgcgatggggcatcactgtgaggcgggatgagcgatgatagattaccccgggccgttgagggtgcccttggcccagaattcgggtatttagagtagagttgagagggacgaggtcatgtactgcaactattatacccaaacaagtcaatctttcgtttctttccgtatctctcaaacacaaacttacatcgttaatcctcggtctgacgacttacgccacaatgtctcccaacggccaagctttcctcagcaatcccgacctgcccgagggtccgacgcggttcccccaagcccgcatcgcgccaccgacctcgacgcacaagaccatctacatctcaggaacggcgtgcgtccgacccgacggcacctgggagggcgtcaccgagaacgccgacggcacgcgcaccctggacattcgcaagcagacggctgcggtgctcgccaacgtcgacgccatcatcaagggcgcctcgggcggcaagggaggcatccacaacgtcatcgacgccgtggtctacatcctggacatggagtcacagtatgcggggatgaacgaggagtggaacaaggtctttgccgatcgtgctagcgcgcctgcgcgggccaccatcggggtcagggagcttcctgatacgcggatgatcgtcgaggtcaaggcagttgccgtggttgagttctagtgtggggatttgcagcgtagcttagacaaaggcagcgggagggaatcacgtgggaaacttggagatgctcggccatgactcggcctgggtgtctggtcatcgcttatcgcggggaaactggatgtggggtgcagctgggctccgggtggatcttttatgaatgtatggtaactgagacttgctgacaaatggtaatatacacatttgtgcggtatccaccttaccgtggccacatggtcttctagatgacgtatttaaccgtgtatccatggatgtattcaatcttgatattcaacataaaactccctaaccttaaagtgacctaggtacggagtagttggttatccaatcactttggttggtcatccaatcactcgagtcaagatacggtacgtatgtactgtaagatatacggagccaaatgataagcaactccaatcttggatcgacaacctacaggctacgcgtattgcgcctacctaatgtaaccataggctatacccgttttgttcaagggtaatgtcgtcgcatcagacagctacggcggaagcaaggacgtcatgctcccggtgtcataagaggaagaagcggtgcgatagggcgttgccatcatgcaggaactgccgggtcgcccatgtgaggtgcagctttctcgacgacgactgccagagtgcatcataccctgtagcgtatgtccgcagcctggagaaaaagctgcaggacatggaaaagaagatggcccagatgtcatccccgcttacagacgggggacccttgtctttcggcggcgatgatcagcaggcttatacagagtcaagtatgggcggcaatacggtggtaatggatcacgactctggcatgcctcagcaggagtccgacactgcgaccagcatgcccggcaacctggccgacttgcttttcccagaaccgcctgcgccaccccctccaccgtgcttcgtcgacgagcttaagacgctctcacttgaagccacggcggagcggcacctcggctcaacatcgggcatctccttcgcaagactcacacaggtcgtgctccgccgactgacaccggataaggccgacttcaccttcgttagcgaccgcggcgcgaactacgccggggcgccgctattcgacttcaactccccctcagacctcttggacccctccctgtttgagggtctgaatgagtctgtctctacccacccgctactatttggtgatgttgttgttgcagacatcacggggttgtccaacgatgtcggcgtggctctggatctgccgagtgaccagtcacacatcgatcaactagtggacttctactttgctcattcccatactctatatccaatcttacacaggggtgagttcctgcagagcctacagcacctccgtgataacccgcacgatgcggcggcgtgctcgcccttgaccttattccgcatctggatggtgctcgccgttgggtccacagcgtactgttccgtttcactgtcagaagagtctgaatctagggtatattacaccaaggcacttcaatatttcgagcaagccatagcctatggcgagatggtgcgtaacccttcaaaccgaatcatctgcttggcagctgtaactcactgactgtggtctctctaggctgcgctggaggccatcatgttgcaggtctcgtactcgttcttcaaccagctaggtccaagtcagtagcatcgggccggacatcggttgaacacgtcctaacataaagctgcagatacctggtatcttgtcggcatggcggctcgactcgctgtaggcatggggttgcattcatcctcaatctatgccggaatgcccgtcgacatggagcagagacgcaagcgcatcttcttctccatctacatgatggatcggtaagtacaacataccgttctatcttacagtatccactgactagctcattagtgtcgtatcaaatgcgctgggccgaccctttgctcttcacgatgatgatatcaacatcacggtgcgacagccccttagcggagcatcctccaaaggcaacacatgctgactactaacggtaaccaaagccctttgtcagtgtagacgacgagaatatcacacccgacggtattcgcccgccgagctccctcgagccatcgctcatggccattccgcttcacatcctcgccctccgcaggatcgccggcaaaatcacccggcaggtctactccaaccgccaggccgcgtccctgaacacggagcagcgcgaggccatcctacactcgctgcacaaggagctcatcgactggcgacgcgacatgccgttcccgctgcccgacgtcaacgaccaggtgccgcacctgtgcaccagctggttcgacttcaactactactatcacctggccatgctctaccgcccctcgccgctgctgcccaccatggaccgcgagcgcgttaagacgctcgctgaggcggcgtccatgtccatccgccaagccttcaacttgcaccgccagcaccggctcgcctacaactggctcaaccttctggccctcttcaccgcaacgttgtcgcgcatctactcgactacggtgcttccggagaacctcgtcaccatcctcaaggagacgagggcgatcgaggacctggacctcgccattgccttgttcgacacgctaggcgtcaagttcccggccgcgaacaaaattagaggcatgattgctgagatttctagacggtataaggacttgcgtgattccggttgaccagtcaacgaactattcgctcctggataaaactttgtgctatatccagccccttttggcatggccttaagcgagccggaaagccagccgtgatagcatacaccacgattttacatctaccgaccgcaccacattgaggaggagaagctgaagagtttttgcaattacttatttcgtttctatctgttagttctatagcgtatatccagcatcaatgattatgtttgccccagtcatactcttcgacgtcgccagactaagaacctgggcggccacatcctaatggtggtgccaataagttaacacaccgttgaagtgacagaaaggttggggttcaaacaacttacctcgactgcgacaaacctcttcagcttggttttttccctgtgggcttccttctgctcttcgctaaaccgctctgcccattcctggtgattaaaagattagccctcattcctatcactcatggtagatagacggggaaatcctcaccgtttgaagcagcccaggcgacacgctattcacccggatcttgggcgccaccatggtggcgaggcccctgaccatgtgtagctgtgcagccttcgtagccgaataagcctgaacgacaagacgttgttagtttctcgataacttacgcaatcctcgacgtggtattccaataccaagctacccggggtcaaggaaacgtaccaacgagctccccataccctgcaggcccgtaatagaagacgtcgtgacgaacgccccctccgtctcgtcgaggtgcggtcgcgccgcctgcagcagccagaggtgcgacttgacgttcatagcgaaggcacggtcccagtccgcttcgacggcgttgtcgtccagcgacgtcgtgtcgctaaagcgagtccagccgccgttagagaagacgacgtccaggcggcccatctgcgcgtaggcctcacgcacaaggcgctcgacgtcgtcccgcgagcccaggttggcctggatcgtgacgtggccatcgccaccaagctcggcgcacagggcttcggcacgctgcgcgttcgcgttgtagttaatcacgacgcggtacccgtgttttgcgaagagacggacggtcgcggcacccaggcctgcgctaccggctgtgatgaggactacgggagtcggtgaagatgccattgcttcgacagtgcacacggggtagatggagtcgtgttgactttgaggtctctcctatggccgatgcaccgaatacttccctgcaaatgcactgctaatatctgtcgtcgtcgggcgggcgtaaacacgaaccaggacacaatgtatcctgctcagtcagccctatccatgatgtcggactgtccgacatcagcagattaggcttctccatagcctgtccaacgtacattagcgccagcgggggcctgataagcacgaaggctatcgatatcgctatcgggccccccgctacgtaccgccaaaggaagcgggggacaaatgctgattttatgggtcgtcttagtggttgtggttagaccaaaaagagcgtcagtatgcggtgcttatcagagctgttatctagtaaggtacaagtggtggactacgtatgatactcctcccaagtcatgagtttggatcagaaagcacatagaggttgaaacctttattattataatttcggctcgttacttaacgacttgccgccattaaaattacaaatagacaattccgcggggttagtgtgagtgagaagctgttccagatggcatccttgtcggtcatcgccgtcgtgttggcgccggtcctcttcctcatcaaatatctactcctcgatcccctatttctgagtcccctgagtcgcgtacccgggcccaaggcgttcgctttgacaaaatggcgtctggcatacgaggactggaagggcgcgcgcacccgtaccatccaccacctgcaccagaaatacggccccgtcgtccgcatcggcccggacgaggtctcgttcaacagcctggcggcgctgcggaccatctacgggcccggtagcaagtacggccgaacgggcttctaccgcatgtttgacgtctacggccgccagaacctattcaccttccactcggcggtggagcacggccagaggaagaagctcctatcacacgcctactccaaatccactatgctcaaggagccctctactggcatggtcgaggagaaggcgcggaagtacatggctctcatcgacgcggagcccgggcacgtgagcgagatcttcagcacactacactactactccctcgataacatcaccgagttcctgtacggcaggtacgggtccacgtctgccctggaaggctcagagccgcaccgggctctgattggcgacatcttagatccgtctcggcgcaagctttcgtggttcaccgtgcacttgaatacagtgacgaagtggctttattcgcgcaccaacacaatggagactgttgtccagccgcttctgcccatgcagaaacccgccacatacaccggcattcgagagtttgcgctgcaggcgtataggagcttccggtcggatatggaaatgtccgagaaggagggtcggccctcggaggaagccgagggctcgtctatcctcgagcgcctctgggcgtaccatcagacccacaagacagacggtctggatgacttggagattgcctcagagtgcgcagaccacttcctagccggcatcgacacgaccagcgacacgctcatgttcctgatatggtccctttctcagcctagaaacaaggcctttcaggagaagctgagacgggaagtcctcggactgtccagggagtcactcaacggccacggccttcccactgccgaggcgagcgacaagtgcatctacctgaacgccgtcatcaaggagacgctaaggctctatgcccccttgccgacttttgagccgagatcgagcgtcgccgataccgtcatcgacgggtacaatatcccggcaaatgttaccgtgggcatgtctccattcaccctccaccgcaaccccgaagttttcaaggatcctcgaactttcaaccccgatcgctggctggggccgcaggcggccgagatgaaccgctggttctgggccttttcgagtggcggcaggatgtgcatcggtttacagttcgttatttcctcctctgtttccttttgtgtagtgggtgtgcaaaacgctgattcactttccaacagcttggcaatggccgaaatgacaacgctcgcggcaacgatataccgcaagtacagcaccacgatcgcgcctggatttgaagacatcacaccggggatcactgctcgattcgaggttttttatgacgatagattccctaagatgctggtatgttcacttgatcctgacttgcacaatccggaaatgacgcgtgttcaacactgatacccctgcaggagcatacttgcctcatcaaatttgaggagcttggtggtaatgcttgaggtagcgacagcgggttaggttgtagatatgtgcccatgggccgtggccccatgccctgtagctatcatattccaagggagatatccatggacttttggttccatatcgttgatcgctaggctgtagtgagcaattggtgctatcccggagcaacctgcaggtagggagacatgaaagaaggctgtccagcgcgcttgcttgcctttcgacccgaacctttggtttctgtgaacttggtggcaccaccagataccctgactgggacagatgaagagtcgagccgaagtgaggcgggcgccgaaaaggcctcaagggattaggttagagagctgcttcaattatgtttacaaaacacggtatacgcgttgtgaaaggcggtctaaaatcaggcataattcaggcatcaaatctacaaaaccaggcattcaaccacgagccgctacggattcggcattgaagtaggtagtgaagagtacttaattctagaagacaacctcccggctcgactcatctgtcggccgtccaaggcacaggacagattctgaccactcatctgcaggactgaacggttcatcattctcccaaacctttttcttctctgttgccagccaagcctctttcattctcgtttgaactccgtaagactccaatagcgcaagtgtcggattgaggtggctgaattgcggaagtgtgccatcgtataccaaaaggtatggatctcattcatcttcctggcagccatgaggtgcttttctccagttgaacgcacacaatcagtccgaatctttaccttagtagcaagattggcccatatgtcttcaacttttattagctttctggataatagcctttagggattgggtatacttacttcaaatgaaggaacgtccttgctcggaagaattctggagatcaaggatatcgtatacccaagaaaagcaatagaaaaagttctcatcgttgaaagcgataaaagtattggcttagcttttcttcgtcttcagagtatacaattgaaatgatatcctcttctgcaggcttatcaatgacatacgcaaccctttcctatccgtaaaagcagaagttagtgtctataactattcaataatattcggacattgacttactttcatcttcttgtgagtggtggctttccagtttttggtattatcttttgcaagattcaaagcagatcacatcctcttctgaggtaaagagtgctcttaggtgatatcgagattttctggttggcatcagtcctcatgtataaagcattgacatgtttcatatctctcagtaggttttcacttaccagcaaaagagtatgtgtacattaaatccttaaatggatccttatcagctatactattcactagtgccaggaattaccccattcgaagacccaaatatgctcccatccactttggtggtttttggtggtgttctgaaagtgaagagagaaaccagtgatcatcaacagaggcagcgacaccaatgcctcgaacataattatttgtagacccacatggacagggagagttgaagagtagggttactcgggatgtgcagaggggcaagtttaaagaagaatagaatgtgaagatatatacaccttcctccagagccgttccttccttttatagccactcgactcaacttccctcaacttcctcaactccacttgacttaacttcacaacttcatcttccacttgcagacatatatactccttgttatcacccattgatagcgtctctcattccaactacttttctttaacaccgatatgcgcttccacattgccgcacttctgggtgtggcctccttggcttttgccgctccatttccgaatgtatcggctcaccctcttcctgacggactacctactccaagccccagtgagctggaggtgattgagcagaattctcacggaactctgtcaaatgcacctcctcccgttggtatcagccaaggaggaatcaccaacctcaagcttatcgcattcaacgaactgtttgaagttgccttcttcgaccaactgattaaaaacatcatcgacagggccttgggttatcgcttcgctgacgaagacgattatgactttgttttggatggcttgaaggtgattctggctgtacgagatgatatttccgtatcgctcggtgacatatactgatatgacgcagcaagaggagctccatgccctggatgccaacaatgccttggcccatgtgggtattgacccaatccagccttgccggtatactttcccggtccatgatttcgataccgccatttcgctcgccaccaccttcacagatgtggttttgggaaccctacaggacgtcgtggagaaatttgctatcggcggtgacttcgcgctaacacgtggggtttcatccattattggccaggagggagaacagcagggttggttccgcatcatgcagggcaaggtgcctagtgaactgcctttcttgacgaccagtgatctcaactttgccttcactgccattcagagcttcgtcgtgcctggaacctgccccaacattgactccattccgcttaagacttttgcacatctcaacgtcatcatacccccgactgcagataccaaaaacattaagttttccttcgataatcaaaaggggatcgaccctagcaccctttggctcacctatatcaaccagcaaaatctgccgatcgtggaatctctccgggttatctccaaagaggacgagacgattactgcagaggctttgttcccctatgacgcacatcagatgaacgggtttaccatcgctgcggttaccacagccaaggggccattcccaaatgcatacagcgtggcgaaagcgactctcgccggacctggccttttcgtcatcgactgattgaactacatcctcaatcgcctctagaagatcaatacttcatacgcacatcactatcattagccctatgacttgagcacgacttgtacatcccatcgacttgaactagttctaggcttattacacttgtcaatgaataaagttcctgacttcctcaacataaatcctagtagatcacatgaaacatattgtttagatcgttggggctcctcggaaaggccgttcaatgcgatgactcttgagcacggccgttgttattgctcaagtaggcaaatatcgctttattaatgaaactgacaagcatggctgcggagatttttggccagagttgttattacgagcaaagaaaccaacaacaaactggattgtgcaaagcatatgtatttatgtagataatcgggctccctgacctcaggatgtcccagtctggaatgatagcctggagataacctttcaaggttccaaggttacccaccgggtggctggtgaagtacccatggacgtcaaaagacaaatgtacatagcaaactcaccttaaagcttaccctggccagcattagcagtgacactggcaacaacagccgtgtaagccgtcgcagccgcaatattctttcctgagaaattggtcaagaatgcagtatcagcctgactaaaggttccggaagacccaaatccattgacctgacagacccgaccaagatacgtgctgcagacagcattggtggtggtatccggcgacgaaaacaactgtccatcaataggcgactcagcaacagccacaatattctggaacacatttccctcagcgagaacatatccgccggagccgatctcgaacgcgtgtcccgagttctggtaccagtagttgttaacctggcgtgtgttagtatgtattcatatttccaaaatagaactcccgagagagttgatcttcccaaaagagaattaaaactcaagaaaaaggcaaaattgattcaactcacagcatgcaaaagtgtatttccctgcacctttggcgcacgtccactggtgtggtagatgtagttgcccttcagggtaacgaggtcgctggatccgtcgaggtagatgccccagtagtggtatccgtcgcaggtggcggagtaatcggtcacgccgttgatgtagttgttggagatggtgacgcgcttggaggcatcagtaccgagcacgatgtgttggcgtccgatgcgggcggttgtgacgtggtcgatccagactaggtctgagttgtcgatggtgatggcatcaccgccccagacgtacttagggttgatgtcggtgatggcgatgttcctgcgtgggtgttagtttcgggatccggtttaattgcgtatagtatctgtaggtagtagtaggcagtatcttactggatgatgatgttgctcgcaccgctgacgattcgcagacccttgcccttgatgataccagccgagccggagccgatgagggatttgttggatttgacggttatgccgaggacaccggcgttgtcactgagagagccagtcagtatggttgattggaattatggggtgtggaatgcgtactagctgacagagacggagggtgcgtccggctcgtagttcgtgcaccagtcgttctggttgatggcaacctggcaagcagacgcagtaccccaaggcgcgcagccagtagaggtagtagttccctctgtgctggtgaagtcgaaggtctgggacaggacgatcacgcgcgctgaagagtcacccaggtacgagaccagctcggctgtggtgctggggtagacaggcgtggcagagccaccgccagtgacgcccttggcaaaaccctctgctgcgccggagacaccgacggccgcagctcgcactgcgagtgctgcaaggatggctgcgatcttcattgtgggacctggtaattctacctaggtctgggggattggagtaattgggtgaagagctgagggaaacatgtcggtcgcggtgggcgtagtcttatataggaacaagcgatccgtctaatgcagatggctctcccaagctgagactagcatgtttgagaatagaatctccgcacccgggtatacaccgtcagagtgaagccgatgttggcccggcacagtaccgaagccctaggtcttggtttagcatagaaacgtgggccccatgtatggccgggtattagcattggtgtccaccattttgcggagaaaagcaacgagtcgtgctatgcaggggttagatttggagaggagtccggaagaattgcagacgcgtaatataggaggtgatagatacaccaatcgggtgtgactgggataattagtatacaaggtcctccgtgaatggcaagttgcaaacattccaggaattaaagtagagtgatccggcgccacaaagtcgtaaatcaggccagcgttggacgatcggctccggtgcatgaagatgtttcacctctgggatgttccccacatttgtaacagttggagtaagcttgacagctttgtggccggactttttgctcaatgaacatgtctccgaggtccaattgagtctctcctttttgtacggactatggtatgtgttcattttctgatttatcccgcgcaatgcccaagggggtttgggggacgataattcctccgtcttggcgatttcctccgtcgatcttcaacaaacagtttgttattatcgcatcaatgagatgcgaagatcaggtccagcccatgatctgagagttacccaccagagctgtcagatgagatccactagaagttccgtgttcgaaataatttcggggatttgttggagaaacattgttagaaatatactaattggcgtgtttcatatagaaaggccatagaaaaagaaatggatgagaatctctaaatgaattctacccattaaaacagtctagtctatataacgaggtgtggtatacaacaagaaggaaaaagatgatcacacggctatacccattttgaaagatgatccactccaatctcgcctagaaagcgacggggagagggcgctgcaggtagccgcgccactcaggcagtgcacggtcgtacttggcgccgtggttcttcttcagatcctcgatagcactggcgtacttgatcaaggtggcctcggagaaagcagtgttcatgatagcaaggccaaagggcatgcccgagacatcgctgacgccaccaggaacagtaataacggggtatccagcctgggcggcaatctcaacgctctgggcgacatcgggaggcacaaggagaccgtcgagagtacggttgccgtgcttcaaagcagcatcgataccctcctcacgggtagtgcgccggcagaactccaaagcctggaagtatgtctcgttcataatgcccttgctctcaagggaagcgatgagaccgtcctggccagagccgaaggcagggtggataccgggcagaccaccctcggagccgtagttatcgatgttgtactggacgaggtcctcgacagagcggacgttagtgttctcgacctcggacaggtagtcacgcaggttgttgtagaagtcaaccttgatgtaggagtaagaggactcgttggagtagccgcgggtggtgccatagtcccagttccagccgtcgggcgagacaatctccttatagtggggcagctcggtgccgttgatgacggtggcgccagcggactcgatcagcttgaccagatcaaggagctgggcgatttggtcggcgtcgccgagggcccagaaggacttccagggaataccgaagacggcgcccttaagagcggtctggttgctcaggaactgggtgtatccaccgacgggggtgagaccctcctgagcggaggtgtagttgtcgcgggggtcaatgccgtagatggcatcgagggcgtaaacagcatcacggacggtcttgccgaaggtgccgacggtgtcctggtgggtcgattccgggatgacaccagcacgcgaggtcagaccgacggtgggcttgatgccaacaatagagttgcgctgagcagggttgatgacagagccatcggtctcggttccaagagcaataggcaccaggttagcagcgacagcaacaccagagccagtgctgctaccaccggggttaacggtgaagttgtaagcactgcggcactgaccaccacgggcactgaagccttcggagtagttgttggagcgcatatcggcccactcactcagagcagccttgccgagaagcagagcaccggccttgcgcatgccgtgaacgacatgagaatcacggggcacgacattaccgagaagagcccagctgccggcagtggtctccaaacgatccttactggcgatgttgtccttgacaatgaagggaataccgtgaagaggaccacggacagtgcctgcagcacgctcctcatcgagcttcttggcaatggtgaaagcatccgggttcacttgcaggatagcactagcaaggctgttagtcaacaattttgacgagattcaacataactaacatacttcaaataaggctgggtctggtggacacggtccatgtagcactccagcaactggacgccagtgaaagtgccattcttcagctcggcttggatctgatcgatcgtagcctcctccagcttgaaaccgtgacaggggcgcatagcgaactgtgcagcgccattaccgcccaggcgagggaagtcataaaggtagggatcgacgaggatctgggagtcgaccaaacagtcggactcttgagcaataacggagctcaccaaggcgagaccgctcaccaatgtttgaattagaggtgccatggtgataattagattgccatgtggcagaaatgccaatattttgggggagttcgtgctgttatacggagtacccccgacaacataccgtggatccctcggtgcccctgcaggtgactaagcaccaataaacccgcatttgcaaaatattctcatttccgctgttttcaatctttcgcacttcctttgggctccgttctttctatttgatctgctttgggcggcttttctattcaatcttatcttattccgtccacatctccgccaaaccatgggaagaaaatgttcaaggcgaccgagatggccgagttgaccaaaatgggccgtttaatttggagatgtatcaattaatctatatgctagcgcgaaaaactttggtacggagtagttggcggaaccgaaattacctgcctccaattgctcgtttaactggatccgaagaaacagccgactccatcgaatgctatcgtaaccgagtgcgctccatttgatcgggcgatcgggctagcagctcgggaagtctcgacccggaacatttgaactcggagggacctgaaatgtcatcattagaaactgattcctcaattcctagcctctagaagaaagactgaaaatgaaggtcggtccttaatagagagtatagaggtgaagaggtgaagaggagaagggacatagctcaatttcaatttctaagagcacccgcgatcgatcgaatcagatccacagtccggagtacggagtagaaaatgtctcttgattggttgcctcgtgccagagattctgcgactagctcggattcctcggcccatgcattgcgtggtgtagattttgattgagcatgtcgcatacgggggcctatgaagtcccagaatatccggaagacggtggaaaagcaagccgcttggagtcaaggcgtgtgctaaccgatttttcacgtgaaagacgcagatcggattagttcagcagacttagggcttgtcttgatctgttgctactcttctatactccgtactccgaactcagttgcagaatattaccccgacggctgattctattattcaccagaaagtttaatgtgaagaatgcaaccctgaaacccgggagcttctccataagcttcgattacgcctttgaacccgcggttccggaggtttatatggctggtacagagttcccgttggccactggcatcctgttccctttgaattattgaatgttaagacccgcttcgagaaaattatgagaattatgccattattatcttcccgaggtcatacaacgtcccagaccttgccctgtgatgtcgttatgtgcaaggtctccttcatctatattcttctatctctaccaattctgatcatgtcactttgaaacctggaatgactgtccccgtcgatatccttgctgcagatgcagcagggagaatccctagcggggtctcgctccaatatctagcagagtctcgcgataggtccgccattgtgggaatcattttcatggtatgcttcacgggcttgttgatgattgtacgtctatatgcccgggtgttcattgtgaagaagactggtctggacgatgcattggccatcctgacattggtaagatcatccacttttcaccccagatctgcacagttagtgcatcgccctcgagccgtgcgcgatagaatggcctatgaatagttacaaaaacataatccactaacaatggcccccatagatgctctacattgcctttgtcatcctctccatcgtcctgatcaacttgggaagcggtcgtcatatcgaatacatccaatatgtgctatcacttcccacggtccgcgaaactgaagtcctcgacttcgtcgcccacattctctacacaacggctctattcctatgccgtctctccggtctagccttctacttccggctgacagcccgctcatcaaaactcaacctgagcatcatcatcgccgcgccgctccttctcgccgcatacctaccacaactcttcctcctgatcttccactgcaagccggtaacaggactctggccctacgagtggcaggaggagccaaagacctacaagtgtctctcatggggactcgtctactccgtgaactcagggctatcgctcgcatgtgacatgctgatgttcgtgatcccggccgtactcatcaagggactgcacgtctctttagaaaaaaagatcaagctatcatttgtgatgttccccggtattttgtgagttcccaccccaaaattcttattcaccaagccccacaaaactaacaatacacagcgttatcgtgatctccgcaatccgcgtttggctcgtagccgcaggtcaatgggactccgacggcagctgggcctacagtccgatgctgtgcgtcgagagcgccgagattgctggaaccctagtcgcgctctcggtgccagcggtgaagcccgtcttcggaaacctattcgcacacatggccgagtatacgtccagccacacgcgctcgcgctcgcggtccacaaaactgcacagcctcggccattctaaaactattcccagtgccgcgatctccaccaatcgggatagcaagcgtctcattaactggtctaaaattgggatggacgattatgagatgatgccttctgaggtctcggtttcgagggatatcttaggtggatcgagggggagtgatcgcagtgaagaggcgaggcataagatgcacggttcgcggagtcccgggattcgggtcacgaatgaggttaatattactcgcgcgcaggagagtgaggttagggttgaaacccccaggtctagggggagttagtggtttcttttcttttgttccaatctgtaaatagatatatactagacgacttatatcatgtaaaaagtatttcttcgggtagcctacgcgccctacatacatggcattgactgcgcattttctttctttatcagccaatagtctatgaacaacctggtcatccagttttttgtcgccgtggcttgagagtatcaagcatgaaacgaatgaccgaagcattatagccaaagccccggtttcccttggttgaaaacagccctcgatatgttcgtgtttgagaataaaactcgtgatgtctcgccgctgtctaacggcgaagcgctatatttgggacgttttaataacggaaatgtgatagacatcatttgcaacagcagtatctagagccacgcataaataaagccttctgtctcgacaggaatctcgacaggaatatcaccatcttcaacctcatctatcatcatctatcctcatctgagcccagctcaagttatcaaatctacaacctcaatatctaccttgttgccgataccatgtcttcaagagctggtcttgccagccgtcaagctgctggttctcaaatcagacaagcacctccactcaaccctccacgctcgtatctcagagtccccctcgatacacccatcactccactcgtgtcctgccatggaaacagccatatcaactttccaaaaaccatcaaagattactaccagctcgattcgatgacactcgacagtctgatggtgtttttcagtcaaatccgtcccgaaaccgcagatactagacggtatcccacgattgtcgctccatggctcacgtgggattacgagcgggaagggtggcagacagacgttatcgatatcgaaagcaagcgctgcaggttcggcgagttcatcggtttaaccgatgagcttgtggatcccaaactcctcaacctgcgaagattgcatgcggagcgtgacaagcccgtgcaaaccccctctggtgaaacgccctccggtgcgggtgctgtgcaaaggccaatgatgagacgggagaaacgaaaggggcttttcaggcggcttccttttggtaaatagtggcgttggtaatttctttttttgggagtcgtttgtcgttggaggcgttaaatagtgtggcgcttattttgttttagtgagacatgaaatgatttgactttctggcctgagttggattattattcggcgcttatactgttggtgttattgtggagatcactctactcctcctgcgtgaataaatagttgcgtaagaaggagagattagcttcatacaatatcaagactcggtcgttcgagtatcatcattgattaaaattcctggagcaggctcaaatacaatgttgtcatttgccaaaatgaaggagccaatctctttagggtgttgttcgagctgttgaataatcaatcctggtgattaccaacctgatcaataatagagatgattctagtgcgaagatatttacgatcaacgtattgtcatgatgaaaatttgatgtataaaagtgtaagaacacttgtttttctagagaatgaaatatcttgaatttgacctgtcccagtgaaccttggccaaacacgttcataactcttacgatccagaatgaccctcaaatacctcattacaggagcgactggaggcctcggtgccggagtcctgtcctaccttgttgcgaatgtcccaccgtcagagtatgctgcagcgtcctcgaaagaggaaaatcgcaaacaattcgaagaccgagggatcgcattccgaatagcaagttacgacgaccctcagacattagagaccgcattcgaagacgtagagaacctcttcttcgtcagtaccaacaccttcgacatcgagaagcggcggaagcaacaccaaaacttcgtggaagcagcgaagaagatgaacgtgaaacatgcaagtcatcaatctccccacgcaaccatcccagctaacatcaaagccacaggtatggtatacatctctcgcattcggcggatacaattccgactccaaggcagctgttcaacaaggccatctgatgacagaggaaatgatgaaacagtaagctaagccccgaccgtgacaatgcagtcactaaccccagccagggccggtatcaacttcacctctatccgtgagggtctgtacacagacgccttcccgatcttcatgggctggtatccgagcacatcgaccgtctacctgccctccgacggatcgattgcctttacactgcggtcggagttaggcgaagctaacgcgcgactgatgatccggggtggacacgatcgagaaatcgtgctgcttactgcgcagcagactatcacattctctgagattgtggatctgatcaacgagacgaccggccgaaatgttcagatcgagcttgtctccccggaggagtttgtgcagttgaagacagctaccgacgagggcgggaagtcggaagggttcttccaggcactgttgtcatggtacgagggtatttcaaagggggaaacgggtacgattgatccgctcatggcggatgtgctggcacgtcaaccagtgccgccgcttgaggctcttcgggctttcttgacggagaatcgggactatgagtggcatcaaaactacgttaatcgcagttagttgttgactgtaatagttggatatatagtatgacaattgtcgcggtttccaatggctaataagttcaaccccaccgggcaacgggccaacgggatgacctcatgacctctgcccagtggatggctgagtcatcactcgagctcccctacatagttacgtcatcccataccaagtgggtccctagttacatagtctccagttgatcaagcacgggctttagatactccccagaagcgctggagtgttcggcaaattcggctgtctatagattagcgattgactatccgaagcatgaactgaattattaccatcctcagtcccatctaggacaatctcatacatctttccacttaggagaatggttgcagggcttgtattagaatcagactgacggggaaattgggccgggacatggagacgaggataactcgatggcgctagaatggaacacattactagttaatatatggccaacttctatagatagaagagtctcactaaggccaaagtgttttgtgtcatggaaaaatgtcagtttacaccggtctctcgttgatgctgttgagctagcatcacgaaaagcttctccgacggatggggaaatgagcacataggcttggccagggttccctataaccacgggaaccttctcggagaccggtctgcctgttgcatcaagggcgatgaattcagtggcgatatggtggaaatggcgagttggagaatctctggccagggcccgcgaaagggggcgaacagcattgcggaacatgaatacagccatcagtagagaagatctagagaaccaatcaatgtggagatgataatctgatgctatctgggctactccatagaggataagtcaagggaagaaaaacagctcaccgccctattcaatagccggcctctttccttgataacaacagtagggtggttagccttttcgctatgtagtcttttaatgggctttcttaatgtctttcttgtaaatctcttctctcctttcttaagctttctagattgagggtatcaaacggtagaaaaaggcttaaagtgggaaaatgacttcttatagttacatataagcttccgtatagttagtatacagtacctacatatttttcagtggctcaggacatacaccgatcctaacaacccatactagccggtggtgaccagctagctacgtactttatactcccttcactccgtatgtgcatatgttgtagtatcgcttctgctaatgatccattgagtcggccggaggagccgttctcccgtctcggcaaccaggaagtagcattgaagcctgaggcatccattttttgtggatttcgacctgggcgcaatcactgatcaatggaggattggagtggttaaatgggatgattgatgtattttctgaatgagatttcattgtcatttccaattgaccaagattgaatccatatatagccatatcactgtgcagtgttcgcagtagccaaattcctggacctccaagtcgacgccgtgtccgcccgaggcttgtaaacacctctgttctgattggctgatatccgctgatgtcagcatctagacacccgtcaaacccgaggttactagcgagacaccttcgacctcatttccttgaagatctctgttggtttgtgacactcgacttcgtcgtcgctagcttagacacttctgaaacctctcctctcttcctcatctctgtgctatcaatcccaatctcctcaccctcttcatcctctctttcctattcacatcggtgtttttttcacatttccgattacccgtcatggcctccctccgtaccacttcgcgattgttcgcggcgtcgcggccgatgttccgccctgccttcgctcgcacctatgcgaccgtcgagcctactcccaccgtgcaacccaagatcaagaccttcaaggtctaccgctggaacccggaccaccccagcgagaagccccagatgcagtcctacgagctcgatctgaacaagaccggacccatgatgcttgacgcgctcatccggataaagaacgagctcgaccctaccctcactttccgcagatcttgccgtgagggtatctgcggttcttgcgccatgaacatcgacggtgtcaacactctcgcctgcttgtgtatgtatctggatccgcacgcccgagatgtcatagcatccgacagcttccgactgaatgctaatcctttgtctgtataggccgcattcctaccgataccaagaccgagtcgcgcatctaccctttgcctcacacctacgtcgtcaaggatctggtccctgatttgacccacttctacaagcaatacaagtccatcaagccatatctccagcgcgatactcacaccgcagatgtgagttattttatatgccagcatcacctccaaaaactaacaattttgccagggtctcgaaaaccgccaatcccccgaggatcgcagaaagcttgacggtctctacgaatgcattctgtgcgcttgctgctcaacctcctgcccgtcgtactggtggaacagcgaggagtaccttggacccgccattctgctccagtccttccgttggttgatcgattcccgtgacgagagaaccgccgagcgcaaggccgctctcgacaacagcatgagcgtctaccgttgccacaccattctcaactgcacacggacttgccccaagggcctgaacccaggtcgcgcaattgccgagatcaagaagatgttggccgtctagagttgtggatataaaacggagtaccgcggaattttcttttctgtccaatgcctttcctctgtctctctatttcctgttttcttttccctttttccccgactatttcacggatgtttctataggtgtaaattgtgaactttgtttcttacaggaatgcactagtagtccattcggttgtatgatgatagcgcatcctatacatttgtattgtaccaatcaatcaatcaatcaatcaatcaatcaggtgtctggaatttccgtatgagtccactatatctgcaatcaatattgatcaacaccgcggtattccttcatgacatgctaagcgaatcccagaacacttatccctctaggcttactcggctatatattctcccacgctaacaccactagcacgctaaaaaggcccggcattgcatccacaaatcataatgcggacacgagcgatactcaactgggctgttagcacagttggtagtgcgcccgcttcgcataattgcgagcgtgcgggaggtcctggtttcgattaccagatagtccattgtcttgtacatctttttggctcgaattttcctgcatttttcttacctttttgctttgtcctcttcccggctgcagctaaaagcgggctataaaatccaacacttcaagcgggattcccattgggccgctcggatggcgggcttacgcgggaagtgcccagttatcagccaatgcaccgcacgtcacatcctttcgaaccagcggcgctccattgtttccggcgctgatggacaaggaggattgtgcccgagtcgaagctagcgtttgatgcgcctgcacctgcacagtgggtgaaatgagattattcgacgaatggcagctctatatagtaccttagcgacctgccgggccgtgataatatccacaatatggttgtgttttctaaataagcatgttgaatcaggaaagagatgaattgtacactaactatgcactgtctactccgtatgcaccaccgatctcgtgcgtcgcgcctctcttttaatctaaacccatgtcctcacccctcctatataatacatggccctcgctcctcttcctcgctatcagtgagccggttcgactataatggattccttgatactatacgtggcattgccgctgggactactggccttgcgcactgtgtaccatctgtacttccatccgctatctaagtttcccggtccaaaactcgcggctgcaacctttctctacgagttctactacgatgtgatcaaaagcggcatgtacatctgggagattgagcgcatgcacgagaaatatggtgagtatacagatccgtcaatatcaaccataaaagccagaggacaacccctcatacctcatccaggcccaatcgtgcgcatcaacccacgagaaatacacatcaaagactcaacctactacgacgaaatccacgccggcgcctcgcacaaacgctctaaagaccccaaatacgccgtagcctttggcgcgccctactctctcgtgggaacaataacccacgaccaccaccgcttccgccgcggcctgctgagcagctatttctccaagcgctcggtggtgaaccttggcccgtccatccacgacaaagtggacaaactaatcgcgcgcttcgagcaagcccaccaagccggcgacgtgctgcacctacaactagactttgctgcgctgaccgcagatgtcattaccgactactgctacggctggagctacggctacctagatggtgagaaggggtcgcggagtaacgacctcgtcgacgcggtcaatgggctgatggttatgttccatatcaaccggttcttcccgttccttatttccattttcaggaatgcgccgcctaccctggtgcgctggctgcagccgcacatggcggatttgtttgatttgaagaataggcttcgacagcaggcggatgatactctgcagaaacagagtgtacggaaggtcgatactgaggggaggtcgactatatttgatgcgttgactagtttggatttgccagagaatgagaggacgcttgatcggctggaagatgagtctgcgctgctgcttggtgctggtacggagactacggctagggctatcactgtcgcgatgtttcatctcatcgacaagcaggatatcatggcgaagctgcgggcggagctgaagactgtgttggcgacaccgctatccaaggcttcgtgggcggagttggagaaattgccatacttggtgagttattgtttctgatccctttgttacttccgttgtggattgctgatttcgtcattccctggactagacgggtgtcgtcaatgaaggtctgcgtctcagccacggcatgacagcccggttggcacgtgtttcaccgactgaacccatgctctatcaggattgggttatccctgcaggagtaagtaaatgatactggctactggcttactggctctaatcttccggttcgattattgggagtgacacatgacggcaaacctaaagccgacttttttgggggatgctgctgatactatgcattgcagactcctgtcagtcagtcgaactacttcgtccatatggatcccacgctcttccctgagccggagaaatttgacccagagcgttggatccgcgctacggcgaatggcgagtatctgagtaggtatatcgtctcatttaccaaggggagcagacagtgtctgggaatgaagtgagttgtgcatatgtatctgcctgattttatactaagattttatctagtcttgcctatgcggagatctacttatctttggcacatatcgctcgtcgcattgacttcgcactgtatgaaactactgctgataatatctgtgtgtatcgtgatatgggaattgggtgtccggaggttgggttgtttggtgttagggctacggttgagggacttgtagaggaataaggttgtgttactgtgggctgtgcaagtttcctctgtgatcatggtcatgataatataggagagtgaagcttgtacttttgtcgatattaagggtcttctgcggtgctatttgacttgcgtgttggttatgcaggtaaccgcgttgtggggtatgtttcacttggtgaggtactgcatgactgaatgatgacggatatttcattatgatggttttggatgtattcaattacgcgatgtaacggatgcacttgcgacgatatttattgcatatgtaaagtcaacctcttttttaaaattgactctagatggtctatcattgtaaatccgccaaacatcaactgaactgagtagtagacaatatattttaaccagcctctgtccatattaagatcatcaaagtagggctagtatcgggatcatactcatgatggaacgtaacagacttcaacactctatgaaatatgatatctaaaaacacagatcagatctgacgctatcctgcgaatgtgtgacaacaacgcagaaattaaaaagtacatccaatcaattccaatgcaaagtaagttcgggatatcatgtactggttggctggtggtgcaaggggggttgctaggggatacctcctgcgtgccagaatatcccctacacattcatcaccctttgaaccaagttttgacgggggttgatcaccttttgtgtatggggtacggagtagacgtctccctgaattatacctggcacagtactagtatacaacataatctgttcttcctaggggtcatccgggaccatccgcctaagatagctaagatagaaaatgagcaacaatctactttagaaacctatcaccctcattgtattgctttaacctacgtattcttcgctcgcatctatgagggaactgaagggagctttatgtgtacaatgtcacattacctccgtcatccacccgttgggtttgcacgctttgactacgtaaaatgttgatcgttagattaatctccagcctccgacaagctatcctctttcctgggcaggtccccgaggcgatcattccacaggagcatacacggcacatggaaccctttgcaaccctccgataggcatagctccctgctatgtagtcgtcatctcagcgatgttgatcactattaatgagagcgcgaggcatggaagatacaaaacaacagtttatccaaagccttacatcgcctacataaacgctagtacaaccctgtctacaactatcagccagtctttcatttgcttctctgaccatctatactctcatttattcccgaagacccacccaggccacttaaccaaaaatgcacgtctcatacatctccctggcgttcttcgccgtcggcgccatcgccgcgcccgccgctcccaagcccagcaatgacttcggagacatcactggcggcttccctttcaacccaaccggctcctccagcattgaagacagtgatgagggattcggcaactccttcccctccgccctcgacgcaatgcaccaggctttggccgagaagcagcagtccgctgaggccgctcagcatgcatcgacctcccatactgcggtacccaagtccacccacgcagtacagaacttcccggctcctgtcgtctcccaggcctcaagtctctctcaggccacccctgtcgcctcgcaagctcctgtgatttccaaggctgcctctaccaccgccatccctactccatcccacggcgtcatccctactcccaagggcagctctgcttctccttcctctagcgcaactccctcccctagcccaactgcccccgctggccctcttagcggccttgtcaatggaattcccattgttggaggtctcgttcacggtcccctggctggcctcggtctccgtcgttgagattagtgttaatgtgatgtgactattgccttatgcactcttctttctttctttctttgtacttcagtacctctgtcaatggcttggtgcttttccttttccttttctttctttttttttcttggcaatcattcatatatccagtgactttaatttataaaatctgttttggctcttcatacattcttagatcgatgatattatgacatgaaataagacaacatctttaactcgacgggtatctccccgcagaccccaaacgatcaatgcatccctcaacagccttctgcatagcattggtcgcctcctccaacagcgtcgtcaaaggcaccttcccagccatctctgcctgcaccctcacatactcattattcaataccttattgatattgatcttgctaactccgcaatctatacacttcttaaagatctcctcggtaaacggatccgccccgtgaagcacgagcctaacctcccgaccaacagcctcattaatagacttcaaccgctcatactccaactgaataccgcggggcccatactctccatgaacattcccgaacgcaggcgcaagccaatcaatcccggtgttcacaaactcccgactctcctccggtgtcgtaagcaaaccctccagatcagccgtatcagcaaccccatcctcaccaccctcaatccgaccaggctccgcctccgtcgcgatcccccgcgcatggcagtactccaccagctcgtgcgtcaaagaaagattctccgccttctcgtagtgtgacatgtcaaccatgatgctgtcgaacccacccaggtccgccgcataccggattatctcgggtgtttgcgcgtgatccatgtgcacggttatgggcaccgtggctttgcgcgcggcttcggctgctgcgtgcacaagtagtccgtcggcatagtggatggcccacgggaagaggaggatcatggctgcggagcgcttggcttcggcggcgcggacggtcgcaaggatgccttcaacgttgtagcagcacattgcggggatgccgtaatggtttgcggaggcatggtctaggatgcgcagggcgcgattttcttggagagtcatttttggtttgggatgggtgggggtgaaggtgagggcaaatgaggggtttgtagttgaggtttactgtagaccgagagtcagtagtgttatatagtctcgttgtgttgtccgacttggtcgcttcacgtccgaactgtcggagttgctccgtgagtgacgtcactctgagctgttcgccattttgtgttatctacacttcctacacccattgacacgcaaaatatgggaaattataccggaggaaatcagactttcagtacatattgcccatattgtcggcaattgtatgatatacagtacttccactgcctgagcaagactaacaacttcgacagcagaattcaggcacggggaaagtagatcagatcaatgtcttattaggtttgttttagatgttaagcataaataacattctatcaaatcaaatccgagagctaccttggttagctcttcaaatataaaaatgaagttttgcctgtggtggccaacttccgaacctctcccaagtacaacttcaacaagcacaagaaccaccagactcgcatctactaaccggaaatcaatcaacatacaaattccaaaatcggaccctggcaatccatcaaatttcggcgaaagccaaggtaaacctctcggacttgcgccgaaccatcccgcgctccaaacatcttcccctcataaacccccacgcaggtcgagccattttaatatattatatacattaacatttctccgggactattctatcaattgtatacatcattccctcatctaaacaaccatgtccaaaccctcaatcggcttcgttggcctaggcgccatgggcttcggaatggccacacatctcgtgaaagagggctacgcagtacacggcttcgacgtgttcccggcctcggtagaacgcttcaagacggcaggcggaatcccagcgtcttccctccaggactcagcaaagggaaaggacttctatgtttgcatggtagcctcagcgccgcaagtgcagagcgtccttttcggtgatgacggcatagtcgcaggtaaaccaccaacccaaccccaaactaaacaatatatatttgaaaataaaaactaacccactcaataatcaacccagttcttcctcaaaattcaacccttctcctctgttccactgtcccagcatcatacgcccaatccgtcgccgcagagctcgcctccatcggcaggagcgatatagctttcatcgatgcacccgtctctggtggtgcgctccgcgctgctgcaggtacgctgtcgattatggctggtgcacccgacgccgcgctggagaaaggccgcttcctgctgcaggagatgtccgacgcgaataagctgtatcttgtccccggcgggatcggcgcaggtagtaatatgaagatggtgcaccaggtgctggcgggtattcatatcctgggtgctagtgaggctcagggatttgcggcgcgactggggttagatgctgtgaagacggcggaggcgattaagtctagtccggcttggacctggatgcatgagaatcggttgcagcggatgctggatgaagattggcatcctggtgctagtgctttgactattattctcaaggatgtggtaaggaatcttgatgtttttggggctttggggataagttggctaattgagtttcgatcaggggattatcacgacatctgcgcgccaaaatcaattcccgactccactttgctctactgccgagcaggtttatttgtctgctttgctacagggatatgggcctgttgatgactcgtctatggtgcggcagtacttcgctgagccgataacgaaggtcacctctaccaagtctgatgaggagacggcggaggcgctgcagctggtgctggatctgatggaggtgactaacctcgttgcggctgctgaggctatttcatttgcgcgctatctcaatgtcgatttgaagcagttttatactcttgtcggtgatgctgctggtgctagccggcaatttatgacgaaggggttggagattattgaggggcctggacaaggtggggatggtgtctctgagactattgatgccgctagttctcgtctagagaaggctgtgcagaaggcgcgcgatctgcactgtcctttgaatctcggcaatgctgctttgactgtgttgttcatggctaagaggtctgggttaggggctgagggaagtgccagtgtggtgaagacttatgagcagtagtgtaattgccgagaatgagtgatgaggtatgaaaattattagtccaaattctacatttgtgctgagtccgcacgcccgatggcctatgctttcacaggaacatgaaccatccaccgaagaagctcatagatgatctgagtcaccgtaattaccgtcgtctctgccttattgtcgtacataggggcaaactctacaacatccacgccaataataggcaggccagcttgcgatagaccatataaaatacggagaagctcccgtctcgtccaacccccaggttcaatggttccggtcgcaggtgtgaaggcttttctcggtcagtataagttgcttaggataatcaagattgagtgtatagtatttaccggggtcgagcacatcgatgtcaatgctgatataaacatagttatcgccgactgtattcacaattctccgaataatgtcgttaattctaatcttatcgatcattcgggcacggatagtagtaaagctataacgatgacacggtgaatgggaggccagaaacggccgcttttgacgccgttttaggccgctcgctcaccgtgggcggtcttggcgtcacgtgggacaaaggcgacggccctgctgtttaatgccacccgggcgttctgttggatgttcctggtgcctgacccatcgatccagccctcggggcggaatgtatgttgtacctaccgagcgcgcaattttaatttttttttgctgatttgatacattacgataatagtcaatgtctgcgtctacctagacatacgcacagcctaagaaaaggcacatgcagcagagcttagatcacaattcttgaacaatgggttattggggaatgagcccggtgtgaatggactgggagcctggggaacaggctggtagtatagtgactctgtttgaatcatccccataaggatgttgcttacaccagaaagctgatactgataaagtgtgcagtgctccgacgccgtgctatatagccacgcgagcttactctgaatcagaataccacggcctgcaaagacgtcgatttgatcttgggtagtcacatccatatcgtgatctgcgacccaaacctagatgttttctagataggcatttgacgaaggtgtgagatgaaggagaagggatgccgcgatgtaatagaatggctatttctaccacttgccgcaccccaaattaggtaggcacctaggataaggcagatcctaatcactattggttgaagaaaccaacgcaatgatatgaaggtaactggtcgtaacggaggttgatacctgagtatagttgaaatacctgctattgattcgcgcttcttattaatttacatatctttggccactcagcatatgtttcatatattctcactcagcctaaagcaccaagacaaaggtctctgatagctcatcggtttgaaaagtcctcgcagcttgtgaccagggagtttctcccggtgatcaagtaggaaagcaagatctacccttccgtgatacattgcaccacttggacatactatctctttttcaatattttgcccttgccgctgagcttttcctcgtcccctagaacgacctgtacatatctagatctcacgcagcaatgatccatctaggagaaagtaagtctgagaagtcatgctcgttcagtgctgcccaagagcccccaccagccttggacggcagcaatatcaatgtcgagagcgagcaacgccaaacccagaatggacgggctagccccgaacaggccggaccgctaagccggatcccgagggcggccgaatccggccgggctggcacaaatgccgattctatctgaagtactatcaattaactactatttacagctagttataactttcctagtctctccgggtttttaaaagaatgtcttgataatattatcactaataaatacattgtgtgggtatccaaaatattatgtccagtcataagaccaattagtatgtacagcccaagagaccccaacaagcgcaggggtacctgaggccaaagaagatatatataaaaaaagaaagagagacatcagggatatcaaaagtcccaacccaaataatccaacgacttaaactcatttcgcatgcgacacacagtaaacatctaaacctcaattccgagcttgacagccgagatcgaatcagccgagatcctgcggtccttaataaacttaggccaggtgttcgtaagcacaaggtacttaatactggcctctgcatcatcaaagatcgaagcgttaaagtccgcagggatctcaccccagtactgcacgcggtctttgatcggtccgtccatctcagcttgcatagtcttcccagagtccacagaagccggcgacggcagatcgaaagtgaatttatcaaaggggctggtgggatcacagtcgcgctcctcgccgtacacaaggcgcgtcggtttctcgaaaacgtcttctagtttccgcagctcctggtgcgagatgttgacgggaaactcggcatggcggacgctgataaactccgcatagagatgcagcgcacggttgaagtgttggcggacgatatcgcgcttgctcttttcttggagcgcgctgccgtccttgatgcattggggtaggtggttgcgccattccgcaacgctagtcaggaagacgatattctcgccggagaattcgcgcagagcggagaactcttgtagtggagctggattgcgctcgaggacgtgctcgagtgcgcccattgtcaggatgctgtcgcgggagttgaatgtgctcgtcgagctgttcgatttccagcctgacatcatcgatgctaccattgtcatgtcggagtggagggacttttcttcggagctggcggatttgactttcaattcccagcgcgcgatcgagtcgagggtttcttgtcggagggatcggtggcgcattacttcccagcaggggaggaatactgtgaatatttcgatgaacatgatggatagacagatcctatagtatacctgcgttagaggagtaggtctttgtggttatgtgtggaacttaccactgaggaggaacgaagaccgcgttgaccggggccatggcgggggcgtagaggccgacgagccacatcggggtagcgtggaggttggaaacagcgcagccaatggtctggactctccagccgtgggtatcgtggatgttgcgagactgccagaggacgatgggggcaacgatccaagaccagaagaattgcgagaccacaccgggccaccattcccatcctgtgccctgtgctgcgagtacctctgccggggtaccatggactccggtgccaggaataccccatgagctatggtatttgcgggagatcacccacatgaggacagtgaggaacacctgcgtgagatggcgagttagataagatttctcatgcatatggaaaagcaaggtaatcatacctgagcaaacattgcgatggcgacgtaaataaggatcttggttgtatatccgagagcacggaagcggttgatcaacccatccttgtgttccaaggcaggcgattcagtagaacggtgtccatccagagcatattttctctggagctttgcgacatgttgaaatctggtattagagccgtggaagagcgccatgccacagggcaacagagtccccatgagccaataggcgccgtcacctggcataatagcgccgatcatagtggcgaactgggttggcagccagtataaatgaagaataacgatagaggttaaggatagagcgagacctcgaatgcgaagcgtcggcatatcacgattggcgatcagataggccataccgaccacgagggcggatgtccatacacatgcccaaacagcccaccagatggtgacggggccgagatcaatctgaggcttagactcagccgtggcaccgtattcggatcccatgttgaaaagtgctgaaggaatgtgagtgaagttgggtagcgcttggtcttttccagagtgccgggtcatgatcttcttatgtagaacatgcgtggaactagggccacggggtaaacttgcacgagcaagtggacccctaatcaggttggatgtcgatcataatggctgaattatccatcccactccatatttctgctaggaaacattatgttgtggagtccctcaatcgattgaggtatatcactgctcagttatggtcttgagtttggtcccgcgtggtggatggagaatatccacagttgctatttgtcaatcgatctgaggatatgattggttgaatatgaaatttcgagatcaaagatctcttggcagcacgaagctctccccttttctattgaatcagcctttgacgctattgattttccaagaattgtgttccgtgaaggaagtcgatcgtagccctaaaaaggcagaacttcacattttggtatgacgtttgaaatgttcacttattacagtgataggtgtaattatttccagactccctgctaccgctaatgcgcgcaaaattctaggctgtttcatacccatgtcaaattagagacaattctctactattggaggaatagaccaggatcacatggaatgtaagataatgactttgtcgacttggattaatatgtagaagtatccaaatttagcctagcatataagacacggaagagactcaaatttcaatagtagaataaaccgaaatgaaaaggttcaagctattctctgccacgacatacagaagaaatcgtaattaaaggaatgaaaaaggaatgaaatccataaatcgcacatcacttaatacgtgaaggctcaaaaagtcccatggctttggcctcctcctcagatcccgcctgcaaattcccagaatacttgatctcaaatccaggaacaagcagggcatccttcagacccctatccacaacctcctcctcagaacgcgcatacatatagccgtaatacgtgtattgccccgcctcagagatcgacacgctaacctcggccttcgcacaacaatcccgatcatgttcaggatccttcaatcccatctgaaaagcatctaactcacagtcagcctcgacataaccatagaacatccctccatagtaattaccacattcaccaggaaccggcgccgcatcacagaggcccatatgcccaacctccttcagggagatcgcactcataaacccagtgtacctatgacgcacgcgctccggcatcgtaaagtgtgcgtccttgcaacacccccatggatggcggatatccgaaagtcccatcgcgcgggcgtggtgcaaatcatccgcccgcagcaacccgtagaacttgccgtcctcgccggggatccgacggatatcctccagccagcgcttttctgcctccacctccgatggtgcatgcattactccatagtagaggtgaaagtcggctcgtcgctccgcacagcatcctcgcacatgaatcgggtcaagtaggccctggcggttcgcgtcgtcttcagaatccgccatcataaacccttcccactcacctgagtaatcgccgtacggccggatttcgcgcagccctcgttggtaggcagattcttcgcttgcaaacatgctgcccatgtacatgtgcttctgaggccgggggtctgggcctggtggggcctgttggctcttgggggatgtacaattgcgtggggaaatggcgatgctggtgtcatcggggggtgcggggatggaattcttcgcctcccacatttggacaagggactctgtgtcccagatatgggggtcttcttcgatacccagctcggcgttcttctcgcgccggtcgtcccggtccttctttagaagtgcggtgtctaggagcttggacatggccttctcccgggcttttttttcatcattttcttcaatgcacttcagaacggtcgcttcaatacgctgctgcacaaggtcaatgtcaagagcggactcttcggacgagtcatagtcaacctcagggctatcaactgagtccgcgggaggcctgtcccccagagcaggatgaggatggtctacatcagcaagataaatacgcacatccacaccggagtcgtcagcttcgggctgttggtggtcagtgtccacctcccgccgccgctgtcgcttctcgaaatattcgtcaattctcagcttaagtatattgtaccttatcaaagaagatccgcaaagcgacgatccagaactatccgtgtcgcagctgcttacattgctgggagtagcacatccagtgccctcagtatccggcgattcagtctcaacactttcctttgaatagtcactctcacatccgctatgggcaagatgagccggactggtcttgatggttatagatgcaaaagagtcaggatctgcagctatctcggacgaaccggaattagtacgagccaatttaaaggccgtgctagacgacctctcagaacgggccaggcttccgtaatccgactctgattcgctgacaacagcacgcgagcagagctgaccatcgtcgctgtggtcagtactacttgtttccctgtcatcgggagtgggatcactcaccatgcgcgcgctaacttcgatcacatggcctgtagcatccaggccttcaatcgtccggtaagatttggcggtttgcgtctggtcgtcttcttgagagacgttatcagcccactcgctctcgcactgcacgcacatgctgggctgggtggagaggaggaggtcgtgggagggtttgatctggttgcaggatacgctgctctctggaccggccaggcggatcttgttggtgtattcctggcagctggtcatgctccagttagagatatgtccgcagctgggatagtggtggtaggtgtgtttacacattctaaggaaaataatagatgagtagaaagcagagagaatatatgagatgagacaataagagagaagtaatttgccatattagataaatattcgcgaggatcgtggtttatatatactttgatctgtgagttgaggtagtctccgacaggcgagtacaaagccgagtcgttgaacaaaggcaagttatataacaaagacagagttaatggcattgttttggtcccatgatgaaactctctgttcaaattgtttgtgaaaaattgtgtataatgcattcccaaagatctttagcctattagacgcgcgtgtcaaagggacttgtgggaaacgcccaatcctcattgtatccaacccagatgacacgtaaagcaaacattgttgatttcatgttagcatggtttcctataggtctagtagcccagtctaaataaaggcagaaacaaatggcgtagagagaaagagctgctaatatcggacatgttttcctttttgccttccccccgctcttgaattctccctcacacatttgtcttccttcgtttttcatatatgagctgcaaagcttcgtcgtagaagggcttctccagtttacacaagaccagtatctgcttggagaagagctgacaaattcctgattgtccaatgcaaaagaactggattggaaacgcgaatgtcgatctgggaccaaggtgtctgacagctcaatcggtatctttcatcggacccggtatacactattcaccacataacagatcctgggcaggcactggaaagcataagagaagtttccaaaatatcatttcatgtacaaaagtcgcatttccgtaataacagtattcccatgaatatattgcctccaggacatccagtcagccctccaaatccgccaaatatctaactccagagtccatcagccaccaagaagcagtctcgtgcatccatctcaaaacaggcctctccaacggcatcctcctaccctcatccgctctcctccacataacagtctcactacaaaacacaaccttcccttcctcctccagactactactttcctcataactaatcgccaaccttccttccacaaaatccaccgtctccatcttaatctcaaactcaacccggtccctcctccgtaccacaacacgataaaccccacaaaccaaatccccaacctcaaaatccagcgcggcaagatatcccgtcttaaaactctgcttctgttccggcttcttgctagccatagcaagcatgagcgcctgcgggaaccgcgagaaagcggtcatattgcggcgcacgagtcttttaaagagcaggtctgtggcctcactgctagggaggcaggcccgcgggactgactctgaggcgtggtcgtagattgtgaagtactcatcactaaagacggtttccgggattgattctatacttggttttgtggatgcggtgagggttccaaggtgggacttgtgcgctatgcgttttgataggcgttcgtggaagatgtagaagtagattgccgacgagctggttattatcgcggttgccgtaaggatgaggcggatcattttggtttttcttgaggctgtgagatgtctacaactggggttttgttgcgaaaaaagtgatgcgatcatcggatacgaggtcggcttggcgcgtcatctgtccctacgtcttatcaccagatcgtccagttcaatgatttccatatgaaatcgtcatgttaaatcgtaaatcggtcaggtctgtgatcacatcgaaaagaaactaagttgaaaacgcgcaacgccaacccaacccagccccaaccaaacacagtggtatactttgagaagatgaaaaaaaaaacacagcgaagtaaacaaaccctcacttccttgcctcattcttcaaaacatttacacggccactattatgccatttcgcaagcttaacaccacacttaccacaagaatgctcgacatccttaagcgaggacatcaagtaagggatacagccgagacagcaacaaaagcaaagaatagcagcccagccactataccaaaatgaaaagaagatcaactaccaatccaatatttcaactatacacggaaatccaacttactgcgtagtcccaccgctcacagactcaacactggtcatctcccgttctccacaaacaggacagtcaaccggataaggtgcagactggacacagtgcagcggtatggccgtagcatacccactaggatggctggaaggcatgtagaactgctgtgggtagcccggcccctgctgtagctgtgcttgtatgtgcgggtactggggcaggggctggcctgcgtatgccttgtcgagcggagcagtcgttgatggcgacgcatcgtatgcgggtgattggctggtggagtcaggtcgataggggtagtgttgttctgaggggccgtttattgttgttggggcgtagctggagcgtagggcgtctgagagggactgcccagtgtgtgaatatgtgtctgagtgtgggcttacagggcctcggttttgatggtctgagaaaacgacttctggatcttcgcaatatacgggggctggtgctggaggttgttaattatttcgtgctatatgagaatatgatggggggctcatagcgtactaggcgtcgactcggggtgttctgtgtatcctggcattgttgtagagtctgggggtctggagacagacagtttgatggggatacaagaaatttcacttgtttgaatggttttaagtgaaatctaacagcgcttgcgaatgtaacaagataaatgataaaaaatagagcggtcgatatgatcgtcaagggctaatatgtaagatgtaagtattacagtggatacctggggattccatgagtgcactgccttgaacagggttataagatatcaagcctaagccacgcaagtgaagcttgcagtatcacatagccagaagactaagagaaagccgtcgggttggtctgtcgatctcgcttttgactcatccgtgcatgaacagggattatctacagaaaaggctgttgatagataggtatgcggcttattttgcgaccaatctatatttggatcggtctacatgaaggggctagagataattcaattcatcataagccggttgatgctagcatatcgcagctcaattctattccgtacatattataccaagccccaacaataattcaaataaaaatccagcccatttacactggcggttataacattattacaccccgacgatcgtaaacgcaaacctgatcacacgggttgtggccgatcaatgcctgtctgagcctttgaaggctgagtaggcctatacgcaaatgctccttagtttctcgatctttggcccccaactactatttggaatacactatattaattgcgcataggcgtattgtaatataaagtgagatatatacatagataaggctacatgaaacaagatatagatgtacaatcactccaaaacatggcctactaaagacctaaagccgaaccgaaaaagatataaatcgatttacgctaggtgccagatgttatacgcagactcatagacccccaagccattagaaatattgatatcgaaccggtccccctcccccaggataatacccatactgcgcaaaaacccccagaatctcactcctctgcattatccccgcgtaagccacaaccgtctccgtccgacgaatcccgcctttaacatacggatccgccccgcgctccatcaaaagcctaaccatctccaggacattcgactgaacagccttatacaatggcgtctgccaaggataccgcataagatcgaccgccgcaccacgatcaagcaacaacctcgcaaccctcatattcccattcaacgccgccagcgccaacgccgtatcccccgtactattaacagcattaatatcagccccgcagtccagcaacatctccacaatccgatcctgtccatacgcggcagcctgcgagagcgccgtctcgcccgtccccttacccgcattgatattcgcgcctgaggcaatcagcatccgcaagatgcggtcgaagccgcgcgctgcggcgacgccgagtgctgtttcgcctttcagagcccgtacgttcatgtctgcgccgtattctagtagaaggcgggttgtggcttcgtggccgaaggaaacggcggccattagggctgttgtgccatcggtgttttgggcgttggcatcggcgcctttggagaggagggtttgcacggtttggtgttggttggcttttatggcgactatgaagggttctcttgagctggtcatttcccatagaatgcggctcattcggcggggcttttttgagtgtgtggaaactctgaaggcgtggaggtctagtgagggttttggctgggtaggttctgtcactggtattggggggttcatgtcgttatcttgattgttctctgtaagaaccgggatggggaagtcttcgactggtaacgcttctttctgtgtatctgtgcaatcttgcatgtccaacgtcactggtattgggaagttttcttctcgtattgtctctttttcaggatatggctgctcctggattgaatatgagctgcgcttgtctgaaaatgagaaaccttttggcgggagcgggagaaatgggaggccagttggctcgtctgctagccaatccttgtcgtctaggcttctctgacgttctaattccagagtttttgatagtgccgtagattcaaggacttcctctaccggagccgtgttttctctgtgaacaggcagaaggccatatgtctctgctgtcttttgaaaagtcgagataacgaagtcccggttcagagtcaacaaatccgaagcaataccagtagcgaccaactcttcctgtaactgaggccagattctgtcttcctcaagcttcgaggaatccttcaaaatatcagaaatagccaaggcctcctttgtgccagcacgaatgtcatcgataaagcacctcagtgcgcgctcaattatcttctgggatgatctgtatcaatgttaaaatccacactgacccacacacgaacataacaaacacacatcatcatattcagattcacctcggtaagcccgaaaataaccgaagagagccgcgcgcgaatgtcagaaaccagactctgagccccgagcgcatctggatgtagaagcagcttctgcaattctagcaggacaacatggcagctgtacaatctttttttcaaaactgcgagatggacgcattccgcccctagagaggaagtatacgcctcggtcgcgcttagtacggtcagaagcaggccgagctcattttgggcctggttcgttagggccattgacacgcgcgttgactcatacagggagtcagctaatagtcggattgcggtagtttggtgccatggttgactgcctgcttgtagagacatggtgctgggctttgagatagtcaatgggactaggccttgcggagtgctgggtgcgataccaggggccatctggagagggcccgtgcagcatcgccccatttttggcctccttcttggggttcgattctatttttggagattatttcaaggtagacgatgtgatatgttattattaaatgaaatgagaagtaaagagagttagactcaatttaagaatgatcagggaatagagtagactagatcaaatccatgtgtgtagcctgcgagggattacaacctcgacattcatctcataaagatcctctaaattaggatactctttggttgatagacattggagatcgagaattcgaaacacacaactacatctacttaatgttactagtctacaatgaaagataagtcaaacagataaacatggtctattcaataacaacaaagcaagcagggaaaccaaaagaatttcacgggcgagaatggctttgaaggcaaacacagggacccatatccagaggcagcggctcactagagagcaagatggtactgggacgaatatcatccaaatccgaagctacaataaagtcaacgctcgcctgtggctctgcggacatctcgtcagcttcaaggtcagcaatggctttcgtcaagggtgccatgatgcggtcacaacacaagcgctcgaactcagccgagaagtggtttgcaggtctattacggacggtgcgacaacgcggacatgcccgtgccatctcttcacccaggacaaagatggcctcgagcagccgcgccaatttgtagagcactggaatgacttcggggcggaggccgtctccaagtccaaggaaccggaactcttcgaatagagtggacttgaagcaggcgcatgcggtgaggaatcgcttttcgtagttcatcctgtcggcctcttctgtgcctaggtatctatttgagctcacgttgactatctgcggcgaagaatagactggggcttgcttagatgtaggtatgctcacctcgagtcttgcgtgattgtagatgataggagggatagcttggacagatgggaaaatcctatttatgctttttcagttgacgttgactggtttcagacaaagactttgatgattgtacttgacaaagggatagaagccatgtactttataaatcctttgtggaattttgagacaagtagtcaaaggcgggcgcattatctttggcgcaccaaattcactcagttcaaattcaatacccagcccttattgggaccaagacccctatgcatgtagagtagattgtagcgccttcataacactagtttacctagaaggtatatccctcttcccataccgtagctatgccctacatgccatcacattgagttaactagataaatctagaagtggcgacatgttttgtctcataaaggacatatttcctgattgagactccttaaggtttgattccttcaaccacttccattatatcaccaaaagctctttctaggctctttgaaacttgcatatatccaatttgcaatgagtgttaggtcatctcggtcgctattagagcaaattcctgccaaaatcgccaaacgatagagaagtctagtacaaagaggcccacgtcttcttgttgctagcaattagtcatggcacacttgatcacgcacagagcaatcatatgcctgatctttcctctcgatcaggtcacccctaatcaggagccatatactatacatgccaaagagactgtggtgagctaccttatctacggattccttgcctagacgagatccctgacgcaaacaatcgcagttctagccaagtgaaggctgtccagcatagatcgggtacctgcacgatattgtgtgactcttgacatactctcccggtgtgaaaagatgatcgacggaaaagtgtccgaatagatacctagcttccaaggcatttcagaatttgccactataccaccaagaaagctaaaggtgatatgctacgggacatggttgctatagacaagtgtgttcttcgcctgaaaacagcttacctgcggatccgttcccgtcgctccacatccccactggagctcgaagaagtctcaagtctgttgcaactatttagtatagctttgttcaaaaacagactgaaataggaagaaaaaagaaatccacttaaaatctcaagaaaaaaaccgcaaaatgacaaagcgttgaggggttgatgtcacatgttgagaaccccccgctaggtttccttgatctggaactctccccatcttctctccacctctccagctctccgcaccagacatgtcttctaccattgacagctcaaatattcccactgatggcacaggtaaactcaaaattactagagctttcattacagttctcattctaacaaaaaaaaaataggtgttatccaactggatccttggttggaaccgtaccgtgatgtcttgaaacacagataccaggtggtcgaggaatggaccaagaccatcaatgaaacagagggcagcttggacaagttcagcaaggtgaattcatctccattgatcgatgtcctctgtgctaatgagtttatcagggctacgaaaccttcggactgcatgcacaacccaacggagagatcaaataccaagaatgggcacccaacgccaaggaggcttctttagtcggtgattttagtacgttgtgtgctagccatatttgaggagcttgactgagactggcagacaactgggacgtcaatgccaaccccatgacgaagaacagcttcggcatctgggatgtaacggtaccagcgaagaatggcgctcccgctattccccacgagagcaagatcaaggtaagaatatctgccccgaatatcagcacggcacccactaagaatccgatagatcacaatggtgctccccagcggcgagcgcatctaccggatccccgcttggatcaagcgcgtggtccaagacctgagcgtatcgcctgcatacgatgccgttttctggaacccgcccgcggatgaggtatacaagttccagtacccgcggcccaagaagccggaggatctacgcatttacgaggcgcacgtcggcatctcgtcgccagagactagggtcgctacatacaaggagtttacgaaaaacatgctgccccgcattcagtatctgggatacaatgcaatccagctaatggccatcatggagcatgcgtactatgctagcttcgggtaccaggtaaacaacttcttcgcggcgagcagtcgctacggatccccagaggatctgaaggagcttgttgataccgcacacgagatggggctgattgtgcttcttgatgtggttcatagccatgcctccaaaaacgtcgttgatggactcaatgagttcgatggaaccgatcacctctacttccatggcggcgcgaagggccgtcatgagctgtgggacagtcgtctgttcaattatggaagccacgaagtgttgcgtttccttttgagtaatctgcgtttctggatggaagagtatcaattcgatggataccgcttcgatggtgtgaccagcatgctctatacgcaccatggtatcggaacgtatgttcattttcctactatttctttagaaagtcccgctaaccgaaagaaacagtggattttctggtgggtaccatgagtacttcgggccaggcgttgacgaggagggcgtcacatacctcaccctcgccaaccagatgctgcacgaactctacccagactgtatcacagtcgcagaagatgtctccggcatgcccgcactgtgtctacctcatgcactaggcggtgctggcttcgactaccgtctcgcgatggctatcccagacatgtggatcaagcttctgaaggaaagcactgacgacgaatgggacatggccaacatcgccttcacgctcaccaaccggcgccatggtgagaaaaccattgcctacgccgagagccatgaccaagcgtaagttcaatcccccatctccaaattccaattatccaaccaactaacacacactcgcagcctcgtcggagacaagacccttatgatgtggctctgcgacaaagagatgtacacacacatgtccacgctaacggagttcacccccgtgatcgagcgcggcatggcgctgcacaagatgatccgcctagtaacccacgctctcggcggcgaaggctacctaaacttcgaaggcaacgaattcggacacccagaatggctggacttccctcgcgccggcaacgacaactctttctggtacgcgcgacgccagctaaatctcaccgaagaccctctgctgcggtacaacttcctgaaccagttcgaccgcgggatgcagctggccgagaagaagtacaagtggctctcttcgccgcaggcatacatcagtctgaagaacgagagtgacaaggtccttgtcttcgagcgggctggactactttggatcttcaatttcaattccaagaagagcttcaccgattaccgcgttggcattcaggttcccggtacataccggattattcttgatacggatgatacggcatttggtgggcttgggcggaatgttaaggagacgcgcttcttcactactgatatggagtggaatgggagggcgaatttcgtgcaggtttatattcctacgaggactgctttggtatgtgtctgacccttttcccgtctgtcctttgactggtttgctgacttttctgtgttcctcgcaggtcctggctctggaaaatactctgtaatgtgaacgccaatccatgtctgtgtcctgcacgcagcagagtccgaaattgaacatcttagtcctagtgttagcgtgatttgacctagtttcttcagtgtgatgtcctgcattttgtttctaactacggctatgtgtctagcaacgttttatatcatatacactcttttgaaagcattatacattgtcgcctcaacagacagagcgtgaaggaagatagtggtgcacggtttccgaaggtaataggaagatcaccttcagagaaataagtttcagtgcagaggcaccatataactagacaaaaagcagctagatataaaccacccgaatgatcgagggactacctgtatagggatgaacgcacctatctctaaccattcaactacaccactatacaaaatacgcaggaccaagaaggcaatcacaaaggaaaagatgtcgagaatcaggttttgaactctaaatacacaaaataatgaaacatgccggtctaggggggtgggttgtgtaaggtatctccaatctagaccggctttaaaatcccatcaagtcgctaagatagacgaacgcatcacgaacctctccccaaccaccgacaaaaactcacaacctcttcaacctcaatttccaaaccacgattctgccgtcggtagatcccagacatttcagattcccttgctcgggttcctttcggatcgagtctagacagaacgacaccagggagttccaacattgacgcgacaaccatgcagtggaaatggaagtgaaatcaaatccctttcttgttgcatttgttttctctcttagatcgggtaatgtacactgtggtaatatacacgcctcgaaaaagggaaatgatgttgtcgcgtacaacgttggaacactttgagtgttctgacaaagggaattaaatgaaaccgagagaaccaatagagaataggtgagggaaaagaggaaaagaagaggaagagcttgaaggtggagggggaagttaagacggcgctagctagcaaatgacaaaattacatttaggccttgttctcaagctcagccaggatcttctcacccttggcacgggcagcgttcatgtcgccaaccatgtagaaggcggcctcggggaggtcgtcaccctcaccagcaatgatggccttgaaggaggagatggtgtccttcaagtcaacaagggtaccctcgataccagtgaaaacctgggcgacggcgaagggctgggacaggaaacgctggagcttacgggcacgctcgacagtgagcttatcagcctcggacaactcatccataccgagaatggcaatgatatcctggagggacttgtactcctggagcatctgctggacacggctggcggtgttgtagtggtcgtcaccgatgatacgggggtcgagcatacgggacttggagtcgaggggatcgacagcggggtagatacccaactcggagataccacgagacaacacagtggtggcgtccaagtgagcgaaggtggtagcgggggcaggatcagtcaaatcgtcagcgggcacgtagacggcctggacggaggtgatggaacccttgtgggtggtggtaatacgctcctgcatcatacccatgtcaacagccagggtaggctggtaaccgacggcagaggggatacgacccaaaagggcagacacctcggaaccggcctgggtgaaacggaaaatgttgtcaatgaagagcagcacgtcctgaccctcctcgtcacggaagtactcggcaatggtcaaaccagtcagggcaacacgggcacgggcaccggggggctcgttcatctgaccgaacacaagggcgaccttggagggaccatcgagctggatgacaccggtctcctgcatctcgtggtacagatcgttaccctcacgggtacgctcaccgacaccacagaacacggagtaaccaccgtgggccttggcgatgttgttctaaaaattgcaagtataagcatttaatgcggatttcaagagatgggggatagaggaaatccttacaatcaactcctggatgaacacggtcttaccgacaccggcaccaccgaacagaccaatcttaccaccacgggcgtagggggcgagcaagtcgacaaccttgataccggtgacgagaatctcggcagaggtggactggtcgacgaacgcgggagcatcggcgtggatgggagcgaacttggtggccttgacgggaccacgctcgtcaatggggtcaccagtgacgttgatgatacgaccgagagtggcgggaccgacggggatggtgatgggggcaccagtatcctcggcggtgacaccacgggagagaccctcggtaccttcagatgacgttagtgaaagctccaatttacggttggaccacactcgatcaattcccccgatcgggtagggaacgacacggtggcccaagaaaggggtgggaaggggtgaagcttaccgtccatggcaatagtacggacgacattctcacccaagtgttgctaaaagcaattgttagctttgttgcgatttgaatcaaggttcagccaatcagatcacgtacagcaacctccagaacgagcttctggccgttgttggtggtggtcagggcgttgtaaatggcagggagcttctctccgctgaacttcactgtaagatggcgaatataaagtcagaaacggtttcgttgatgattttggggttgattgcgatggtttcggtgatggattgggtccagggaaaagattttcgcgaggtgcccgttccgtcaggagtcgataacacgtaccgtcaacgacggcaccaatgacctggtgaacctttccagtcaagagagcatcggagctagcgaagcgggcagtgatagccgggagagcattggaacggacaggctggaaagcgcgggcgacgggggtcgtccgggcaaaagcagccctcccaaaggaccgggcgagaccgctagagagattataaaattagtttccaaatgaaaaagacaggaagattcaatggatcctaaaaccatacctcttgaacataatgactgtgttgaagagcgagatgtggtgaaaggaagaggtgaggttggaacgggaaaagagggaagaagaggaagggaagaggttggtggatggggactggtcgcccttagcctttccggggcggttttgccgacgatcccgtgatgaaccgagcaccaacttgagctatctacagggaaaagagcttgattttctgatttagaatggttttttatatataaatcatgctctctcttatttttaaatatccattgccactagtatggtgtggtgaagtggtgaccgaggaagctcagcccgttgccctggaattcgcgcacacacaccgggtcttggcggccgggtgcaggggagccacggcttttggctcaatgacatcgttgccccggagaaatcttcgagatattgaaaacattgtcccttaggctggcggtgaaagggtgaaactagaaaaagatatcacgaaagtcaatggccctttggtccgaatatcggaaaaactctgacgtgtgccaattccgggtcaaaacatcgaacatataaaaacgtatgcactaaattagattccaagctaagattgttatgttcgttatattcagatggtttataatcttcattcctatttatatcctctttgcatttcatatctccatagaaactaacccgtattcttctgttactatcggaaccaccgtgttcccgcagggattctccgcacttgcgttggttccgaatcactccgtagaccacgccatgtcggagcgcaggggcatacacgtagatcgtttatcctagagttacgtccatatcaaactcatgttctatggctacaaaagagatacattgattatagcacagtacgagatacacgcattttccaatgcttgccaaaaaaagatagaatggggaacagtcgacgcgcgcacgggcggaggcccatcctccgatacaaagacatgtcgaacatctatggaaagagtagcttgcaataaaatcgacatccaggtcgtgcgacggatgccgccgtccgtcttgcgtagatatcaagtcactcccggtcgggtaactagaacacctatgacttctcagcggggccgctctggacaaagcccttgccttcgtagccctctttgctgatgccgtggatggggttaatcttctctttctgtagtcgaataggttagcatcgtccaatttgaccgaggcagagacttctcccgactgctgtcggaaggggcgtgagatacataccagggcatattcattggaggcctcctgccactccttggacatggtaccgggctgcttgccggcaaaggagtggacggtgtagaagatggcaacggaggcggcagtgagctggagcaccttgaagaagacgcgcaagccctcacccttgggggcctgggcacgagggccgtgggcgccgaaggcaatgtagtaagctagagcagaggaagaattgatgtcagtgaaaaacgattacttgcaaagataatcatggacgagggatcaggtgcatcccgtcatagataaccgcggaagcctcaggatagtcgaagcaagaggccgtctttcaagccaacacattctaggggtagtacgtaccggccttcttctcctggagggtcaactggtgccagtcgaccttcatacggtcacggagctgcatccagagctcggcctgctcctgagggggcatgccctcccagcgcttctcgatgttggcgagggtagggttggggatagcatggtccgaggcagcgcgggtctgcagggcgttcacagaggcagtcggggcagcacggaaggccgcggtgctgcgagggacagcgcgagagacggtgcgaagaaacattgtgcggcaggcgggaggtgggaggaccacgtcggaatcggtttcaattgatgtaattagacggaggtcgggagttggaaagccagagagcacgcctgggcacggcttaggagtgagtggaggagaatcgtggatggggaatgacttgaagacgtttcttgtggtttgaggtggaaaggcgaggatccggtcgggactagtgcggttttggtttggctgcctcctcattggctcctggcccaaatcggctgtccctgccagtgagcatcatcaccattctcagccatgtggcatgatgttgatattcttcaagtgcttatggacttttttttatttcgacggttattatgcctctattcgcaaggttccccagtgtcaaccagtcgctcaagtctttaggccatcgtcggaatctttagccgcatttaaactagcccagtcatgcagtagctttcgcaggaaaagccaggagttgtccagttgcctaactattctacattcaacaccatgcatcctgagatcttctcgtccgccacgtgcaatataaccgacaggcagcaagattcggtgcccaattgcccaagtacctcaacttgaagtaaaaatcattcagaacggaacaagctgagagtaaatcaagactcctcagacctctcgcaaaatggtacaaacacgggccaagtcgtaacggtcttgcattgcaactaagaagaaaatgggagaacggtgtgcaggaaaggtaatgaattgatcgttccgcggcgccgtcaagggcgcacccatatcagtcgcgcagcccggatccagccggcgctatcatctatgccttgccaccactggcctccttcaggactgtcttccactcgatatcggacttgtcatcggcgtggatggaagtgacgacgttgagggcgttcttgagaacctcgcgggtgctggcgtagatcatggaccactgaaaatgaaattagctattggttctgcacatgggttgaagcctgggtctggggaaatcttacgagagtgggggtctcgctaggcacccaggagatgaagataatcttgcttctgtgagaacaatcaggtcagcgggaggcctgagaacaattgcgaatatcagaatgcgcacctcttgccctcgccggcaatctcgtactcgacatcgtagacggcgtaacggggggaggcgcggccctggctgtctttggcatcggcgagctcgttgcggaagacctcgtagtcctggtccttgccgactgagtctacgacaaccgacttcttgtcgtcggcgatcttgtagatgatgtacttggtcttgccgtggcttcggctgaagtcctggaaggtggtgatacagtcatcctggatctggacactgtagggggcaggtgtcaataaatagtgaaagtgaggggaaaccagttgcgagcgcgggaaccgacgacgacttacccggatgcgagctgcgcgatatcatagtcagtattgagtgttgtatatcataaggttagaggtcaatacgaaccgacatgatggcttatgtagatgagaaagacaaaaaaaggacgggctgtctagcgctatgtcagtggctgagataaccaaactcagggggtctttcgagcttctcggattggcatgagaagtcaaagtagtatgcactccaattacttacagggattgaaggaggcggggatcgagacaacggagacggatgagacggggaagatggagtttgaggggtgaattgtttcccaggtgttgccatggccatagtgggggtggctgcacgtgatatcagacttttgataattaaagtgctcggtacctgtttacaagttgaatgacgtgtaaagaattgatctaatatagtttgtttttaagacttctaaggtatatgaggctgtttggagtttcgacttgaaaaatgacatatagtgtcagatatgttgaagcatcgaacaatatttgtgttctcacgaggtttttgctttttcatcctcgaagtaccaggtactccaaggattatgtacattaagatttataatcacgccatcttagcctatagctgcatatgtacggggtacggagtacataagacgttggatgtgagcctccccaatgtgggtgtctgcgagctaaaattggccagccttcaaccatgggacaacgtcagtggctaattttgccttggcccaccatatctactgtggtttatgcaatacaatatattgacaagctagatttactgcgtctgcctacatattgttcttttattgcttgactacggtgtggatatagcttgacaagtgtgagcgtttaacttcataaccaaaatatatattgtaaatatgcatagcggatctatatattcagacatataattgtcacgcataataacgactgatgtccatcaaggagtttagtgagctgcaggagaattctcttccttcagaaaactgaaatggtctacttcaatgtaggaaatgaatccacaagagagtgatgatattgtaagactagctctgccctcagcggcaaaaaaaaaagagaagagatacaagactcctcccatctgtcgatattgtaaaaagaagagccttgccctcggcgataagaaaaaaaaaaaagagacatatgacccctcccatctgtcgatttttatgcttccactagtagtgcgaggctggtcatcgcaagaaggtcttccacatcggtgcttccgctcggggcaagcccaccacagtcttcaaaatccctgagggtcttatcgattacttctgcctggccgctcatgtgcagaaagtttccgatgcaagcgtgtatttggagaagtctcggatctggaagttcccaacttccgttatgaactttgaaattgacaatccgatccttaggcaaaaaaaagattggccctgtaagggtatccggaaaggtcttgatatgatactggtggggaatttcagttgcttcgaaaataagtcggaattgaccaaattccctgtgaatttgggagtctagcatcatgacgttattatctgaattgatctgttccggggcaaatgacatattccgaagaactgggaagtagcgtcttagattaacccaaatcactgcatttctgtgtactatgctgcgggcattggcttaaaaggatccaagtgagaatggaatgatgtgggcggcttcaagatatgttgttaatgtatcttgtggataggggtaggcttgactgtatttatttgttgcaagacatttgtaactatctctttctaaacagtggcgccggagttgcgactgggagtttccattgatgggctcgatatctagacttttgagattttcgattgactcttcgaggtcagggcgcggagacggagtgacttcagtaggtgttttaccaccctgtgatttcaatggaatcaataacccggttttgatgctttgtactagttgccgaagcttttcgtcgtctgaacaccctaaaatgtccaccgccagatttgcttttccgtcaggaggaaggacctcgaggaagtcactgaggaagtccttggttttatctgtgggtttaagtggtttgtagctgttcagctttcgatccgttttctagcttgattgtgagtatcaaagactagaaggcataagagactaaccgtctggaatgatggcattccgcccattatctaggttagggtacgcttgagggtagtctagaaagtatggaagttctagtagaagcaaggtggccgaatcagttgtgacacttgagacggggattgatgattgcggaatgaagcgaaacaattagaatcaacgcggtgaaatgtcatcggctaactttggcagaataatccaaccggcagaataaatatagactaggcttaatctggctagacgatactttctatcagtaaaacccggttgtaacgaattgaatcagacacgggtttgaattcgttatatccaggtcttcgttaaatccagaacccatatatcagatatatatttctagatcacatacagatttatgctccaaaaaggccctgatctttctttgcttcctctactatattttcctcgcttctaccaaccttttatacttatgaaacgtactaattagtcgtgattcaccctactcctgctactctttataaaaatgaaggggtttcaaagcctgaatagccttacgatataggtccttagcctcttctgtaacgatctcatcctggaacgaattcactaaatgtaggaaaggatcctagagattattaaaggagagggtcaatggttatatgctttataaagccattaagcaagctctttactaggtggtaaacagaagggtcgacgttctgggaggttacactgcaacgagtatctgatggactctggccgtcgagatccctaggcgtaagaagagcatggagcagactaagtgatcacataactgcactgtagccaaattcatttctcattcttcgttccataggcaacataaaaaagacagcctaagtatgtagatatgtcaaaccccaaccctaggtacatacatctaaactgtaaccggataactaaaccttcggcgccggcgcaaacttggccctcatcttatccgcaacaagcttctcatcataaatgaagttaacactgtcatgcgcaaccgtcgcctcagcccagcgcttaaacctcggagcctgctctagcaaagcgggcaacttagccgaaacaagaccatgttcaggcttggcgaagctcaaaatcctcaacaagaacgagcccgcctgaacctccgccagggtcagtttctcactaccaccaaagaacggacccttgccctccgtgtctgccaggagtggctcaacctccttcacgacagcagcgaccagctgctcggcggcggcatcgcgctcggtctcatcagcggagcggatactggcaaagaaagaaggcaggactttgctgaagaaggcgtcgacgaagaaagagagacgcgcgcggtagatggcgttctcggttggcgaggacggtgggaggagatggctttggtgcgcatctgcgaggaattgggcgacaatgccggattcggctatgatggttccgttataggagatggtgggaacgaggccgcgctgttggaggtggctgttagtaaacagtttatagtatacgaggcgtagtatgaagtgtaggtgtatagataaggagtgggtgtcggaagagcgcttgtcacttactgggttgatcttcaaataccatggctcgcgcggggtgtttaggtcgatggtgacttcctcatagtcgaggccgagttccttgagggcgatatgcgcgcggtgggcccaggggcagacgcggttcgtgtagagaatgatctttggggcggacatgatggattgatgtgtgatgcacaggaggaatagaacttagaggagtagagcttagagaaggaagttatagtgaggaagacacgccattataaaagacattgcgaaatgaggggttggattagtaaaatgcaattgttaatcaatcgcgaaatcgagggattgactccgttaactccgttcccggataagaattgagcagaggtgggggattcggagagaaatgtctgacaaactcttggggcttaataatggagaaatgattcaccttaattgaggtctagctttgttaaaattggtctaaatatgtacatacattaaagcgtccactatatgtgtccgatatctgaccaaaccaccttcggcggcgctcagttatcagggtatagaaatggtctcaagtggcaaaccgatgtgtagtacgtaaaaagactggagatgtgccctaggagtaaagagcacatctgagtccgatgcgccagcgaccggttccacacgaatcaagtggaagaaagataatgagaaaatgtcaaactaaggaaaagacgagatgaccgtcataaaagggggtatatcgaatacgagtataaaatgagcattgagccgattgttgagatgttcggggaggacggccagccggggcgtaaaaagcactggaagggatcaacacgctgtcgtcaggacgtaattttgcatgaaaactgaaaattgagaaccgtgctcaagcttcctcgtcttcctggccgccatcgatgatcttgtgccagtgctgtggtagacagatacagaccagggggaaagccttgatctcgccggacggcaagggcgacggcatacccgagccactcgagacaccactgtcgcggtgttcgcggtaattcatgccttggtcctcggcacgttcggggagtcgcacacccgtcgcccagccatcgtcccagatgccaatcaccctcaacatctcgcctcggtcaagttcgaattcgtcgcccgctcgtggtgagtatgcccaaaggacggcaaccttgtcgccagcgtgaatctcatcttgagagtagtagtcccggaaataagacagctgctcagatcgaccactggtaactgcttcgggggaagagtatgggttcgtcgggccggagcgaggcgagctgtcgctttctagtccagccagaactgagttgctagagagtgagccgtgacgtttcccggtcaccggtgggattcgcttggacatagctcctggactggcgcccatgccttctgagtctgacgtgtcgctgtacttggccccgccgccgtacatcgccgcggaggtacgcgaataagcgggcgatgattcactgggcatttcgcgcaatgcagacatccgcgtgactcggcctcccgggaccatgttgtacgatgtcgggcttgggggctgctgcattgaaagcgatccgccctttctttgtgggtttggttggttgagcgcagcttcattccgtgtctcacgacggcggcggcgcgtgagaatacaaaaggcgaggagagcacctagaatggcggctcccacgacggagccaactacgatcccagcaattgcgccgcccgacaagccatggctagaatctgcgacggcggaaggtgagggcgtaagagggggtagagtaacagtcggtactgagacaccgtcacagcgactcgtggcattggatttcgtacagcaactatcggtgccattcgcgcaaaatgtgcagagaccaatggtatttgtcgcaaagccacagttgtcaggctcattcgcagctcctttgacacaatctccagaaagggcgtcggatggtttttcgcagatggtcaactcggcatagattaggtccgtgtagttcttgtcgctcgtggcgcataagtctgtatttgccatggtctcctgttcactccgggcccaaagtgcgcatgtgtcgacgcaaattggtatcgagtcgtttgtggaaagtttgcagtcggatatggagctttgcacgacactgctgcacaaaacactggttgtatactgggcatagtagttattgggggcacttgaattgatgccctggcatcccagtaagtcaacatatctgggagctcctgttagtgactcttctcccgatccattggtggcagcacatacttcatcgaaacatatgacccaaggacatagtcctttaatgaattatcgaaatccgtcagattcgacacacctttaaggaaagggctagcagcgcactgtcagcaattgttcttttttttaagcgcgcgtttccactcacaagtccgcatatagactggaactggttgaaatggacgagctatcccaggcaggacaggcacttgaccccgagagggaaatgcaagagctcgacatgccgggcagaatcggcggtctggtctcaaatagacccctttgggttatcgacgcggaatgtgtcaattgcgatcgagaatgttccaggcgttgtcgcgaatcgcacggatattcgaattgggagaattgaataaattgttcgaccccaggtcggaactgtctcgagctcgagaagaagaaaaacgcgtgaaaggtaaacgagtgactcggggttctcaatgcccggaaggaaaggtcaaccgagccccgtaggcctaaatttgaaatgagagaaagagatgacaagacgaagttctaagattggaaagacaaggttagaccttcaagatggtctgggcttgtgggtaacaaggggatgagctgggaaaaagggcaattatgaaacacggagaacaggcataatcggctgtacagattcaggcacgctaaactcaatattggctacactctgtgtactccatggagacgggttggacgcagtatagaagacaattgataaaagggggtgggggggaaaggaagttgtgccgtgttgtttacctttctctttattctgtggactctttttgggtatcaaaacgcaattgggactaaaattctacagacgtacgacatatggtgtactaatactaaacacaatgacaacggttatcttagagtcaactataattggcaatgtctgctgtcaatttctgaccggttgctctgttcatcaccagcctcgctagtgacccgttagcggcttagacaagacgatcactatcgcctcgagaatactatgaccagggtccggagcttaatattaatttcccgaatttcccttgcatcatgcacacaatttggcaatagatgtagcacatttcaacgttgtatgtgagctatcggctgaggatgcgagggaccgaattggacttggtacggaatatggagtacagggtacccaatcacaagcagtaagcagccggcagttgcatgtaccaggtacttacaagcatagtactccgtataacctatgtgttaatcaatccccccgcttgggcagatagttatatgacaagtctgttcctatagacagttagtaaatatacctataccttactttcaagtagagggaagtgtatatcatctaaagtcaggcggagtacaatgtagggcaacgaattacagaggtcatgtgaccattgacatcatctgatctggaggctgccgtcagacaatctgcgactcgtcggtggaaaacctttaaccattgccaacacattcccagtgtactcgataacaactcacactttctatcagatctcagagaccctgcgagccatgtgcagctccgaccttttcctagcggtactcgccgtctttttcccacctattgcaggtaacttttaaacccgcagacccgcacgccaacacacctacacttggtccaatgctaaccaaacccccgcatcaacagtctgggtcaaggccgggttctgcagtgcagactcgttcatcaacataactctcaccctactctgcttcttcccgggtctcatccacgcgtggtacatcatcctcaagtacccggagcaatacgacgacgatgtagcctacgagcccatccccggaggcgggagtcggcggcgcgatctggagaacggaaacgttacctactactacgtctcacgacagccccagcgcggatatggcacagtcgacactcaagaccagcaggcgcctggtccggcgaacaaaccacacaaccagactgaagcaagtggaaatgctgggagcagcagtgcgcccccaccaccgacttatgctgaggctgtgaagggtgacaataagctgcagagcaatgaacgagagtgagcactgactcgttggctttgcttgggtggcgtcctcggcttcccatcgtctcatcggtcacctatttcccgacccggttgtgttgtccataccctttcgcttcactgtttttgtacacgcacttcttgagaactgcatcgttatgttatgactttgacgaaggaacgttctatgtaattctgacttttgattttgttcattgcttgcgtatcttctttgattatatgttatttgcgggatactataccagtactttttatccttacctcggaggcacttagtaccaactgggcttttggtttgataactcctatcttgtaggtattattctcaatcttaatatagatcttcttgatttgagcttctaccacgcattggcaaatcgttagtggatacaatgagatcctgctttagtagccagtgggtgctctcatttcgggaggtggctatcttattgagatgaaggtattgtgaggtatggatgtgtaggaacttctctgggcactcgtatagccactcatattgtatataccccagaatggattggaagattggatcagcgtatcggtcctggaaggctgtccatctctcagtgaaactgtcaaccttctcgcgtaattcctttgctttctgggactttgtgttgcgttgagaagccagggaggcggtgaactgagggcttcttgttgctgagccttagtgagctgttccgatagaatcggccaggcgttcttcatgatgcaaatattgatataccagatacaaagcatgttctttgcctttgcgttcggggactagatggttggtcaaatagaggaccgttgatgatcgagctgacggcatcaaaaacatcagcacttcgtcattgagaagctccggtatgggccagccctgccgatgcgattcgcattgatccttccagccacgctatatttcagattcttacgagctggcgtgtaaccctgggacatagtgattgtgcctgcttcgtagtcgcggaagacagagcgcagttcaaatactttttaggttatcctagctccttcatgtcgtagtgctgcagtagttagtcaacgacctggtcgatttccttttcagtgggtgcagcgatgatcaacgtgtatcatcatgatacctagtcaagtccatgcaattgtcgcctgttttgatttagatataaggatcgcccccgagaggtcggaacccgatgctatccatttctagaggtatacggtgtctcgaagtccaaagacccaaagagtgtctgccttcggcgtcaaaatattcgaaacctgagggttggcgtatatagaccgtctcggtgttgaggtacgcagccgtaaagtcgacttatatccactatagaacgacacagtgataggtatagtggtatgagggatgtgcactgggctaagaatatatgatgtgaagtaagactgaaggggcccaaaataggcttgacgtctcagcgcgaggtcccataagatgatatagatgcctgtcagggtacggctaagaacgagagatgacatgatatataggagtatcaataagcgaagatgtcaaaagaaaaagaaggacgagatactgaatattgatggtaagtaacattgtccagagcacgagatgagtattaaacaaactctagaaagtcgcttgacaaaggatttatgcctttatagccaggtagttcatatttctttggataacgttttacaaactcatgctgattcataccattcctatgtatatttcctccgcatatggtcgaaaatactgatagcttcaggttttagcgactcgggtgttcatattgacgccaaggtcaactatgcaggacattatgatcataaggcgtatattggaaagacggactgctgttatggttaacgatgggctcgatatgggtttagacttgataaagcctcgaggaaaagggatcgtcggtgcaatggattgacgaggtaggcaatcggagctatggatgtctctcggtagaggggtaaccctgtaaagcccgtttcactaattaatcggaacattaaatgcgattggccaactatatagtacataattaaaacattccaaggctgtattcatagaaaattgctacaatgacctacagcaatctgataagcctatccgaggccaagttccgtcccgaattgatcctcacctagacactctttacaccaccaccacttcctgccacaagcctgtggcctttgttttggccatgcagtctatgccacagctgcttaggcaatcactccgatcaagtctccgactcacaagcccctccccagtgcgagcgcacttccgacctgcattctccgtcagaccgactccgcggagcttctccgcctgtgtacaatgccaattccgccggcagccgagcacatatttggccctcaatgaccgagagaagttctccgcggatacagagaggttaatcagggaaaaagagaaagaactagccgagctggagctcgcctcgcgcgaccctgtcccgatcccgggtctggagtcgggcagctcacttgattcagtacctcctgcggaggacgaacagagtgccgcacaatcgaaaccacaaacaaaggagcatgaaaaagagaagtcagtttcacaggaagaagatgccagtgttggcacgaggagtggaggcctgccatcgtatctggaaagccgtcggtcaaaatggtccaagcaattcagcacagtgatggacaatttgcaatccaatgtttttgtagcaggtcagcgtttaaatgacctgactggatactccagcatcgaagcattgaaaaaagatatccagttctatggtatgtaccatagcaatgcccgaacccgaccccgcgaaacctaagactaatcccacgaaatcatgcagagaaccgactccgcactgcccgagcgaatgtcaagcaagcgaaagaagactacgccgcagcgattaatcgccgatcgacttcccaacgcgaagtaaacgagctcctccaacgcaagcacgcctggtcctcaacagacctggagcgattcaccctcctctaccgcaatgatcacacgaacgaggtcgccgagaccgagacctcccacgctctatcggccgcagagcgcgaagctgaagaggctgccgcacaaatgagcaagagcatcctctcgcgataccacgaggagcaagtctggtccgacaagatccgccgcatgtcgacatggggaacttggggtttgatgggcatgaacgtcctattattccttattttccagatcctcgtggagccgtggcgtcgcaagcgactcgtccagggtttcgaggataaggtcgttgaagcgttggagaaggagaaggccctgaaccgggctatgtttaccgagaacgctgtttcgatcacgccgcggtcgaatgtcactatcctccccgaaattattgattctaccgacgagaacataattgagactgctccttctcttttgattgaaccgaagattaccacgacggagaaagatgcgtccactacggggtccattgtctcggtgaccgacgctactgccgcccagtctctcaagacccgtctctcgaacattacgttgccggttctgtcagtcgagtactggaggcaggtggctagcgagttcttcagtgatcgcagcattgctgtctcccaatacgatctcaccgccgtggctcttcagagtgccgcagctggtgcagctgtgacgggcctactgttcgccctgatcggatctcggtgaaaaaatcatttcattcgggcatgttataattgcattaccagcgagagcgcaccatgtttcgctcatgtttggtcttggcattttgataatgacttggcattttgttgggtggttatatacttgtacatacaattgagaaaaatagataaacagttggatataacccgggaattgaatttagtgtataactactatttgagaattctggcctggaaagcgaccatatatcaaaatagcgaagcattgacgttatttgttgctttcataagagaaccaagcaagcgttgaacaaaggaaataacatgactaggtgatacactaaataaagaacatatgtactcaaggagaccatcggacatcctctgaactcccgagctcgtgtgtttgccatggagaaagatcaagatccaggaagatacggacaaaggaaggaagaggctcattttttgtccatattaaaacacaggtctcttaatcttgacaagacacacggccgctctgtctaaaaaagggaagaaaacacacacacacacacacaagcacatacacagatagataggacatacaatccgtccatcttatatcatccacacttttaatgagactcgcccgttggcggcgatcaaaaaagggtgtattcaaaaattcgcctatccgataatcagggtctcatcctcggggaagctgtaggtgggaacctccaagttcagaggggcagggcccctccgaatacggccggagatatcgtagtgggaaccgtggcaggggcagaaccagccgccgtagtcaccggcctcgccgatggggacacaacccaagtgggtgcagacacctgtagggaggaaggaaagttagaaagttgcgggttgttgttcgccaatcccatgttcacttaccgagcatgacgagccactcgggacgctggacgcggtcctcatcgggctgggggtcacggagagtctcccaattggttgaacgggcctcatcgatctcggcctgggtgcggtgacggatgaagacgggcttaccacgccacttgatgatgacctgttggaatggatgttagatagggatcctgggtaatgggatctgtcggatgaggtggtgaatagaaacacgtacgttcttgccctcagggatggcaccgagagagatctcgaccttagcctgggccaggacatcggcggaggcggacatgttgaccaggaaatctggagagaaagaataacatcagtcgtttgttcaaagtcgcccaaatttccccaattattcaagaatattgttcaattactgtattccatgccatctctttctgattcgaagattccacaaaaacctaccctgaacagtagccttggcaccgacagcggtcgccagaccgagggtgccggccatgaagtaggaaaagacctggttggtgcggggcgagttgttggacttgtacttgctgaagttggggatcttcagggtcgagccgggttcgttagcactggcgaagggggattcgaaagacgacttcgaatcggcgactcccctccgctgctggcaggaggtaacggcggcgcgggagatgggtagctgctgccgagcgacggtgcgcagcagagtgctggaagcggaggagagcgacattgtgagggcaattgaccacggaggggaattgtgccgcgagttgtggagagcgaggtgaggatagagggtggatgaagtcggaagttgaagttggagccagagctttcgctagcgatcggaatcacggggcctgtcattggctgaccggttcccgttcactcccttgacaagaaaacattctacaacttctatactacttgaattcatatctaatgtattctgtgaattgatattgattaattattcatgtttctgctgaaatttgactcgtcaattgtatattatcacattttcttttgttatatctaacccgacccaatgcgaccaaaaccaatgcgcagggaaacccatcattagaaaactccaatgcaaacaacaagattcaagaaaaaaggataatgtagcgcaatcaatcttgcatttccacatcctggtcatgggttgccatgggctcgactgtccggtccgcaatcaacgcactcacagggaccataggccgagaaaccgacggagatgatgtctttgaatcttctttttgtggggtggcatctcccatcactgtgccatttgctggtgtcggaggtgcaattgtaccgttgagagtacgctggcccttctctatggcgccttgattcgccgcatccttcgccttcttctccttgaattgtttgtaagtcgtagtcttgggaatcacgtcggaaaggaactctagattgtcggtgtgtgataccgccgaagctattgtacgttagcatgctgtccgacctcttgctaaccgaggcataggcgtaaccaaccgagatctttatactggacggtcttgcgtggttttcgctccgatttgaccacgttgtgcccttgctcggcaagatattggatgaacatctcctagatctagcattagtcggtgttctcgaggtatttaggtagagggcgcggcatacggtagccattgcgatgacgaaggtcgcgttgttcgagcattgcacgatatcctcatccaactgaatgatcttcttaattcgagcaactatagaaatgtgttggtatgtcaatccaaagtaatagttgtgtctgggacttactcggaagtgcactctgtccggtgatctcatccggctctcccacagtctttggagccatgatgattgattctggcgagataaagtattggcaggacaaatttatacaatttgcagcatgctccagtcaaatattcccgttgtgaaagcaagtgagcgcgagcgtggagtcgagaagagtgaaacgcgtggccgcgttatctaaggaggctctccgttatcgattcaagtgtacttggcgacttcgctttgtcacatcatctactttcaagagcttcattcaccctcgtcccctgaattgtcgcctatagcgcgttaaagtagcaccctagagggatcggacttcgaattcgagagttcctcttctcacatcaaagagcgcggcgtccatcggggacatagacagatcatcgagtcaactctaaatcgactatgctgaccctacctcctcgaccaatgttatgacctctacacgcccctccacgacctttaataggtccctttcagtttcaagagagcggcgcagcccgcgaatgccacccagtcgttctgttccctcccccgtcgaccgacgaggcgattccgacaaccaggaagcacccgccatcccagaagagattagtgggatcaagcgatatgaagattttaccacaatagactgggtccaagatgcagtctatgagcagtcacggcgacgcgcgaaacggcgcagtggcactggattctgggatcaggaaggcatccttggctggagacggaaaatgtacgagtcatacgatgcaggccaggcatggcttgttgttacgcttgtgggcttggcaatcggattaaactcggctgtgctcaatatcatcacggaatggctctctgatattaagctgggccattgtactaccgcattctaccttaatgagtctttctgctgctggggtgccgagaatggtatgttcgggaggttctacagcgcttcttgtaaactaactttttccataataggctgccccgagtggaagaattggacttcgtggtggctgttaaattatgttttctatttctttggcgcggtaagacgtgtgcccggctagtactcgagaaactatgaactcataggctaattcggaagacagttggtactttcatctatcgctggagtcctggtcaaatcatttgcgccgtacgctgcaggctctggtatctcagagatcaaatgcattattgccggcttcgtcatgaagggcttcctaggggcatggactctcctaatcaagtcaattgcccttccactagctattgcgtcgggcttgtctgttggaaaagaggggcctagcgtgcattttgctgtgtgtaccggaaacgtgatatcacgatttttcggcaaatacaaacaaaatgcatcgaaaacgagagaaatcttgactgcctcagcggcagctggcgtggctgtcgcctttggcagtccaattggaggcgtgcttttctccctggaggtgagttcaatcgtgcactagttgataggacgtaagctgacagtcaataggaaatggcaaactattttcccctcaagactctttggcgcagctatttctgtgccttggtggcaaccagtgtgctagcggtacgtttcccatattgccaattgagtctggaccacacctgatccattctaggctgtcaatcctttccggactggtcaattggtcatgttccaagtggaatatgatcgcacatggcactttttcgagttcatcttctttattggtcttggcgtcttcggtggactttacggtgcatttgtaatgaaatggaaccttcgaatggccgcgttccgcaagaaatacctctcacagtggcctataaccgagtcggttgttctcgcgggacttactgcagtactgtgctaccccaacatgtttctgaagatcaacatgaccgcaatgatggagatcttattccgcgaatgcgagggtggccatgactatcatggactatgcgagtatgattattcgcctccatatgcatgaaagaacaccactaactcattgcaggtccaagaacagatggtcgatggtcttctcgctagctattgcgactgtccttcgcactgtgttagttattatttcctacgggtgcaaggtgccagccggtatcttcgtgccttcgatggctgtgggggcttcattcggccgcatgattggaatcatggtacaggcattacatgaatcatttccccaatcggcattcttcgcctcgtgtgatccagatgtcccttgtattacaccgggaacatatgcgttcctgggagccggggcagccctcagtggaatcatgcatttgaccatttctgtaacggtcatcatgttcgagttgactggtgcactaacctacattctaccgaccatggtaagtcttcattctaaattgcattacctcattcaaccatcctgactgtccttttacagattgtggtaggcgtcaccaaagccgttggcgatcgattcggcagtggcggtatcgccgatcgaatgatatggttcaacgggttcccattcctagacaacaaggaggaccacgtcttcaacgtacccgtatctcatgcaatgaccacaggcccgctctcggtaccagcatcggatttccccgtccgcgaagcagagcatctcctaaacgacaacaaattccaaggcttccctgtcgtggaggaccgcacttccaaaaccctagttggatacatcggccgaaccgaactccgatacgcgatcgaccgcgcccgcaaccagggaatggttgcgccaaatgcccggtgcgtgttcaccaaagatgcagccgaggcagccgttgcacgcagggcgtccgtctcgcaccactctcggtcatcagatacattcgatgcaattcagaggagtgtgggggcttctttcgtggatttctcgcgatatgtcgaccacacgccactgaccgttcacccgcgccatcctctcgaaacggtcatggagattttcaagaagatgggcccgcgagtcattctcgtcgagcaccgcggcaaactaatcggcttggtcaccgtcaaggactgcttgaagtatcaattcaaggtcgaagccgaggaacatacactggccgcaacgagttcttctcaatatagtgcgcttggtgggcagctgaacaaccctgcccctgaaacactggaagatcgcttgtggcggctcatccagactgccgctgcgtttgtgtctggtaagatctctcgccggccggtccgaccgcgtgaccgcacgatgtctaggcaaccggagcattcggatattctcgaagggagggatgatgacgcggtggtagaattggaggacagagaagaccggccgatgatatgaaatgcgggatcgctatgttgccacgtttatacgttacattgatagagagttatttgctacatacggaacgttgcttgctcatctatttcccataattgcaagctcttatgtgtttaagccaacggaggcaagaactggaatttcccatattcgcctaatataatctacacttgcctcaactaaattctctgatacgaaggttatcaggacttaggattgttcatctcggggccttggcaaacgagtttcatcccccaaacctgctaaaagatctcgtgaccagccaccgtccagtcctccgaccacaacataccgacctcattacacctatagccaccaagctgtctaaataccatctcccgggagtaacatatctggccggtaatgtagcttcaagttcagcttcagtcgcatccctcgccaattccttcatttacatggattgttacatggatcttggcatttatatgcctaatgcagtatgtggggtaaccctatggtataaatgcatttttattggtgcataattaacgagctagccattttgggacttgtgcataaaaccctatcacccatactccgtaactactccttggtcatatgacacacacctaagagtgatttaatattgctccgcttcgcttcaattattcaatcttgaccgggtctacgatgaatattcccagacaatgaaaccatctcaacaaccccgcactattcagacggagttacagcacgaacgctatgggcaatttcctggacgttggattgagcagcccttttaaaggctaagtaaggttgataggggaagcaagatatcctgggtctggataattcgatgagccccgtgtatgtacatattctttctcaatatcattatttagttcatcgtctttcctcttcccttcctcttgtttttttccgagcgagtcctgtcgatatatacaatacagtcttattctctctcctagttgccttcaaggcttttcatatcatggtcagtttgcatgcactatcgctttcgtagactcatcatccgtatcacttccttgtctccttgtgaaacgtgagagcggaatgctattactttgatagcggcgtgaagtactttcaattcgactacctggatgatagcctcggcgactggctgactgtgagccgccagagctgcttggaaatagccttggaaacagcttattcatgatcggattggttgccgggatgctagcagcgatgatagcgacagctatctcgattcccgaagaaatagagatcccaaaggtgtcccaggaggggtctgagctttggtataatttcacaatgtagactatccgcacaatgctggctatacacgcacttttatctagttagcactaatgcatatcaaattaaatcacgccctggacatacaacgaccctagtgatagcaaagcagcgacggcaaatttcttgctagttttgagatgaagacctgaaattgattagagtaataactagagcgaatcggtgaccacaaacctagaactgttctcagtggcaagagaagaatccaaatatccgtcaccagagaaagcgcggcacccgcataccaaaatgggatagatgcaaagcaggtatgatgttcatatttctgttcatcgaagacggcattgaccggggtacactggaatatcgttgcgaggataatggcgacgctcatggccgtgacgagtgcgatggttccaaggcagattactcggatgttagggaatacgcgtaggtatagcagacagattgatactttgatcagaccgctgattaaggtataaataatgtgagtcacgtatcgaatctatattgttgagactggttagcctcttctttccaattgcgttatgacagttatcattctgcccataccttcgccgaaggtagcacatctgctttaacgagatcccatttatgctttcctgttccatacctgactcctactcacatataagagacgaattaaccatataagaagtagaaggcgtaccaagtcccgcaaccaccacgttcacaattgccagaaccgtcgcagtcaccattatccagtcgtctaggccaaacattttcacgatgaagatcctcgaaattgtacgaaggcctacaatgagtgccgcgaggcccgtcaccgtgccgttgatgatcagcaatataggcccacggttctcaacctaaagagacagttagagaaagctctgggagactgctcttcctctgagcctttacttacatcagatcgcgtctgaaagagcgtctccataatatgttgatgtccttgaaaagaggacgggtcttaggccccatatgaactaatttttatccccgggatccttcgaggtatgcattggccttttgcacccatggatctagggcttattctttcgggcataaatcatacttccgggtggcccccaaacactaatttaatctaatcacagagaccggctgtcgtaatctccgcccgtcttgctttcgcttaaggattgagctagttactactaggaaaggctctaacatatttcacatgcgagcatcaagttgtaatttaccgcatttactatgtgtgcttgcgtggccggcttgcatgcggatgtcgaggcatagatccggcgttttatcccggtggataagcagactgcagggagcgaatgccagtgtgaagcgcttggacaaaggcgctaacctcggtgttatcaccagttatgttctacaggatctgctagtacggagtagtagtaatgaacgatccacctttatcaccttggcactttaaaaagaaattacaccttccgattgcttgggctaggcaataaaagggatgttataatccttgtagaaaattaatctactctgaatagccttttttggtttcactttgtttacaatacacacacttctcgacgttcaatgatcctgatgccttctcttttgcagaacctcctgctaacaattcccctggcatgtctagctagcagccatgccatcagtgattcccttggctcgaactataagatcgatgttcattcccatgtcgttccgtcgatttggaaggaggaattgatctctgcaggctacccagtcaagaatggtactttgtatacagatggcttccctgtcccagattggacattggatgcacacattagcaccatggacagccttggagttaattattcgacaatcagtgtcagcgcccctggcgtcttcttcctaaaagatgccaaaaaggccaaatccttggctcgcagcgtcaacctcctgcttcataagtattctcgaactcatccgactcgacttggagccctctgccttctccctctcccttacgtcggcgaggcggtcgaggagttgaaggtacccttcttttcttcccctagtagattatctggtcaaatctaacttggaattcgtagttttgcctggatacgctcgggtttgttggcgtggggctgtacaccaacgccaatgggacgtatttgggtgacaaagcccttgaccctgttttctcggccttgcacaaacgcaatgccagcgtgtttgttcacccagcttctccagactgcacatccgtcgcccaaggctggcccatcccgatgaccgagtatcctttcgacaccgtgcgtgccattgagaacctgctgctgactggtcaacgtgcacaatatccggatatcaagatgatctttgcccacggtggtggtgcaatcccattcttggccacccgaatcgccggcatggcctccctttcctggttgggtgggctgtcggtcgttgaatccctggcgcaactcgccggatattattttgataccgcttcctcgacttctgctattcagttgacggctttgaagagctttgttggcgtggatcagattgtgactggaactgactgtaagtgggcagtgccagtaacagccccgaaacagctgcagtatactaacacatacagatccgtatgttcctgtctcccaggcaacgtcgggattagccgcgattgagggtaatggtaactttaccgcggtggagatgagtcagatcgatactctgaatgccttgacgatctttccgcggatcatcaaagctttgaagctcagttgagatgtatattaggcattgcttgtagattattaacatagaacagcttttttaatcaccgcattcgcagttaacactattcttatataattcatttcgtttttttgtgtcttccggtgtctatcaagtactcatgcaaagtgcaggagagctgtcttgattatgcatcaggcttagatgcctaaaagaactccttttaccgaagtgcacccagccaagggtgtcgcaagaggtcctcagcggaaattcgatcagtgggattgattttcatcatcgcgtgcaaaaaggagacgaactcatccctgacgccttggtcgagacctggcaggaatgcttccgacgccagccccggccggttcattggcagcgagttcttgatccggccattatcatcaaatatgtcctgaacaatgtccttgtttcctctccctaaaagctccttaggaaatggcccgaatagatccacaatctctcgtaagtgttccttgagctcataatggccgtctggcggggccgatccgctgaacatgcgaactgcccggaagacctcgaatacgacacacccgaggttccaccagtcggtgctcgcgtcccacggggcctgtattagaacttcgggagatcgaagcgctacaggctgtataatctcgctgagatgtcggtcttcccagctggagacgccccagtctccaagggcaatatcaaattcagcaacgcgcgtattgtcagtttcgttgaagtaatagcggcgtaaggggattgaggggatgactgagtactgttcctcggaccgattctgtttgggaatggcgacctcggccagataaccagattctataagggaaaaatccctaaacttgacgaaaatgttatccggttttatatctgatcgtagacaagaaatattagcatgtcatatatcataatgaccaaggacgaaagagcatatcatacctgtatgaataacatgatgttcgtgagcaaaatcaagcgccagtaggagttggatggtgaacctgcgcatcaccgagttcggaagtctactttcaatgaaccaagcgccgaagctccgtagcgtctcgcccatcagctcaaaaaccaagcagacgtgagttccattaggtccgtggtgctcaaagtcatctagcagatggcagacgtggttgtagcccagctgattgcggtccccgttctggagatgagtcaagatcttccgttcgaaaatgggggcttgcgtgccatcataacactcggcgctgagcaccttcagagctcggaactcattttcaatgccaggtctgtttgcgtgtgttatctctatttattccctttttctaaaaagattctactcactgtaccggctgtaggtctctgacaagccagactgtcgaatagacaccatatccaatcttattcaggaccttgtaccggtctttaaagacatcattgatataaacagggtgaaatcctcccggtcggtacacctgcgtgccttcctcgatattgtcgttggtattgtcgggcatctcggagaatagaacgacgtccgtaatgaaggtgagagttgaaaagctgaagctcagcaggagtcacagttgcagcggcagacagtagtgaaaatatgcaaatagacttggctacgcctcttatccctagatgtcttctcaagggggtcgattcagttcgtccaaataagactggcgtggtttctgggcggtaaagtcagcccaacgaacgttcatgaggtcaagactcaagtactactgaaaatgcgcaggtccatattcctttatatatttgtttgacacaatccacttctatattattgcactaaagtcgtgagccaattgtcaacgttgattagtcttccaagtccaaagggggttctgtacggagtagctggtacagtaagtcagccctagagccctatgtatatagttaggtctgagcgtgcatgtattgaatggtacccttgcaatggattactactttgtaattatgaaattgaaattgtaaaatggtctaatctattcactcctacggagtccgtcggttgaaaaggactaaatgcagtccgaattaaaatgcattcctgcgatagataatgcagattgtaagcatagaaaaggcgtagcggtgtcaaactggatcgacaactctaaagctatttcgatagacacaatgccccagatagaccaaaatgacgaaaatcaagcccactcggtgaactagatccccgattaggctatatgcaatcaaagttatgataaatagaacttacaggttaggaatcctaatcaccatccagcagaagactttacgatgatgcattcccaagcacatcgcacagaattacccaggatcagtatcggacgagacagcgtctctcaacaatcgcgctcccggagccaggtgacacgacgtgcctatatatccagcagtcttagcacagatcaaatacgagtaaaaccgcccaaatatgtagctagtcaaaaataattataagcggaagaaaatccacgaatacgaacaagcaacatctttatttgtgtgcagcactgctggccaacttttgcatccccagatcaaacagatggctggtacggagtagataatgatacctatgtacaaggctgggcctcgtgccccgcagcatacgatgaaatagatatatgtatatgtcttgttcactcccacctctataattgaatagtaaatcttttcgcaagttttcctcttcggccgtttgacatccaatccttctaacccgtatatgttatacaactctcctgagtcatgctcacaagcgctaatgatgtcgaatacacgaatcctatcaaacggaccgactcagtggaccaagcagtgattgcatacagcaagacggacactagagatatagcctccgcaagagtgaactgtactccgagacctgagctcgtgacccccctttctctccccctctcagctcacaacttacattcgaaaagaggagaaaacacttggcacactggtggtacagaccccaacgcaccggaacacgttacggtcgtctacgaagattctaatggacagcatgtcaccgttaaacatgttggtagaaatggaaaggctgtttagatcacgagaacttccatgctagttgatatcctgtgattatatgagaaagaagttatcggtacgcgggtacctacaagatttgattacaaacataaagcacttccgaggatatcctctttaccgaagtgttgtcaatgacttcggcgtatggcttctgagcaagtagtcaaggctagcatgataaactagcaaacaactcgtcgagatcgaaaatttccttgcgagtttcttgaatttttactgccgtatgtagtcttgcttggggatgcacttcttctctcggtatatagcctgttaaatcagtcagcatccctagccaagtttactttaatggatattgtcaaccacttacccatataccctagggcttgggccacgcccgactctgaatccgtcttcttcgcttccacaatgataacatttaaagcaacctcctcattttcaccgtaccagactccgtagtctgtccgtgccgagagcattaccaaatttccctagggcagctctgcaagggcagccactctctgtaaaacctttggtaaagccggacccgagtagctgaagcccgtatgctccgttttaacaaagcaaaattggaacggacgatatagtctcttgtctagcgaaatttccgcgagggagtattctggaattttcctaaagttcaaaaacccattcgcttcaagtacactatgcagaatcacactgtcaagctggtacgagcctccacccaactcgcggagaatggaccgccagcccccaagctccagttgtacaaaagaaaatgtcacatggcgaatagaatcttgaatactgtaaagaaagatgcccaaagcagccgaagattcgaatgacattcgcgagaaagtcaattcttgcagttctggcaagcacccagccgacgaaagctgggagagaaggaaagttgattcgcacttccagttgaaaataatcgtcagctttctgagagatttggcacattggatcattttcgccatccaatgtatagtcttggtctcggcatcggggattgcaaagcacagttccttgaggtgggaaaaggccgggataccaaaagtggcaatatcaaattgtgttagcttatcctgaaacactctggttctgcttttcacaatgctgattgagaaatattccatcggaatttgctcattagcgatggctttgagaacaagaccagtggcttcgtcaagcgtgatgccatggctgtacgcgtacggtgttgtataacttaaattgtgcagctcgaaagaccggcagttggacaggcgttttatcacatcgcaccacgcttgaatatagatcctttttgatgtggcatcaggggataatggtcctaggtagccctttgaatccctgacgatctctagcttgcggacacagggacaaaacatctcgtcattggctgcttcctcgacccggacaagtgaatttggtgaaagatcggtcctcaatgtgtgtacaaaagtgtgtgcaaactggcgaaggctgctctgataaatcgctcggcaggtaagtcgaagagcgcatagatcaagagactcggtaaacttgacaatttccgccaccagttcaactgggagagtatggagacctgacttgcgtgctatgttggttctcatactgatccgtggagtaggggacttgataagaaaagaaggaagagagttgagatgagatacagttgaataaaagagaatagtgagttggaagagaaggaaaaggaggataattgaagctccggtcttgtttaagggactggatagtttctcgataacggcatagaatgcggtcatcaaggccgctcccgttttggtatatagggcatcatcacaggtatatatagcttcattaccaaattatgacaaaggcggacaatggaaaaagagggcagaatagaagatgtaatttggggttatatcaagccatatataggaataaagacctgcattatcagacagatgtgcaggcaaacatataaaacaagctagatgaacatagccctttccctcttatgatttgatgccgacatggtaatacaaagtgatgaaaggaaattgaacagtcttttgtccactgtggaaggtccagttggtgagatcaagatctggctgatctagcagttgccaggtttcctttgtggtgcgagttcggaggcaggatataaacccatcaacgaagatagtcagaggcgctacgggcagaataaatgtgaaaaagagatggactggcgaatcccagtaccaaataagagttacaaagaaagtccaaaagaagaccaaaggcgaacatagacaagtccaaagatcgcgtgacgtgatttcgaatatgctgaaggggatcggattagcttatataacaagtggttttaatagattgatgacttgcataaacgaatcggcggtctcaattgcgctcttcagtattcctgctgcatcttcgtctccgaagtgatggaaacaaatgttgaagatccgacactcctttttcgaactttctgcaaatcgaggaacagctcgagcatccaccgcactctcgatataagtgacattctgctgcttcttcgagattcgctcccactcttcaatatgggggtaaagatcgctcaacacaaaatgaacagggcccttaccctcggattcgagctctttattaagctccgattccaggactggggtaggcccaccggcaccggcacatatgtccaaaactgtgtaagaggaaagatctttaagatgctctttgaacactacacatgcctgtttcgcaagatttccatggctccacccgggagctcgaagattccacagttgggtgagaaccagttgctcgtgccgatgaagccacgatgggcaccaatcttggtcgccgatctctagaagatgtgaccgaggccaggagaatagttgcattatgtgtgcttctagatattggtgagaaaagttgtctgaactgagataggccgctgacagggaaatcgctcagtcacgtgccggcccaccgactcttggggacaccttcaagaaataaaacacaatgacaacaaaatatactaagttgatcgcttgtgtctttgaaaagtcgtgtcgtcttggatattacgtgtggttgtatccggggcgaccttgggatgtttcaatccacaaccccttcacaaaatatgtaacttctattcggtcttataacaatgcaaccaacccatcttgtcacccatgaactaaacctaaagtcctatacatccgtggatatatttctgcacactaactgcatggtggtctcggaatttgcactagtcctaattcggacctgacgcagttcagggaacatcactttgacaccaacggagaacatgaaggtcgttattgtcggcggaggtctaggtggcctagcatgtgcaattgcctgtcgccgtgagggaatcgacgtggaaatcctcgagcggtcccccgaagtccacgaagttggagcaggaatccaaatcccaccaaatggcggtagaataatgtgcgactttggcctgcttccccaactactggagcaaggaagtcaggtgcaacaagtggattttcggaggtacaaagatggtcgtcttctgcgatcaatgccatttggggacgatatcacggaggagttcggggcgccgtggatgtacgtggttgattgccttggcgcgacattgtcagactcttaccctttgcagaattattcatcgggtggactatcatcgcattcttcttgatgaggcaatccgactcggtgcggtccttcaactgggggcagaagtagagaatatttacaccgagcagccagccgttcttcttgctggcgggagacgcatatcggcagatattgtgattggtgctgacggtacgtttatagatcttttgtcgaatatatatttaaccatctctactgacaaggaaaggtcaaatgtctacggtccgaagggctattcttgaatctcctcattctccagtccccacgggcgacatggcctatcgagcaaccttttcacgagagcagctggagtctttgggtgatgaaagagtaaacaaactgtgtcagaaaattgccgtcacaagctggttgggaccggagaagcatacgattttctatcctctccgtggtggaaatgagttcaaccttgttctcgtgcggcccgataccttatcattgggttcgcgcagagagcagggagatattgaggagatgcgagagagctacgcaaactgggatgaaacgtaaggacccttggaatagtcgactgcaatttcctaatatgcttctcgctttttagattacaaaagctggtttcgtgtgtgccatcggtatataaatggaaattgacacacctctccgagcttgaatcgtggaccaaggtcggtacaatactatgtccttccaatcacgaacttgctaactaggacttactagggatctgttgccttgcttggtgatgcctgccaccccactctgccatatcaagcacaaggggctgcaatggctgtcgaagacggagcagtcattggcaagcttcttggcctattgcaggtccattatctggatcctagaaattccggaagcgatccctcaatatccacgcgatcttcagctcaagatctcacagctgctgtgcttactctctacgagaaatgccgaaaagcacgcacagcccgaaatgttcaaggagcaatcatgaatcggaagctttttcacatcccagatggctttttgcaaatgatccgggatttcctgttgggatatgcaggagttacccggaagagcgattggacatggctgtcttcatttcggcaggggcaaacccttggtctagatgtgctggaggattgccaaaaggcctttgaggagtggagattgaccctttaattgcacatcatgtggtgatagatggctatacgtcactcctacatctattgctatactatagatccatctacaaaccccatactcgatatcacttccgtacatactaccaaagccaacccaaatcccatcaacgtatccaaaatctctagatcaattacagattatagatccaaacaacctatataacacctaacctcaaacccatcccaaagctaagccccttcccgcatcccaaccaaaatacacccagcacccatcatcccagcccccaaccaccaaagcccaccaaccgcctcttgaaaaacaaccattcccagcagtgccgtcgccaagaaattcgacgccgtattcgtgatggagactttgaccgtcgaggggccagccgttagcgcacgcgtgaagagtgcccacattattatgttgcagaggacgtttaagccgaggcaggcctgggtattgcgttagtaacagaattacagtataacacccagttatacatgtatattgtagtagataaatagtccagagacatgcatagcccagagacaaagagaaggggtgtaaacatacacctcgagtgagcatctcaatcacaggcgatgactcgagaccgaagaggtgagcgagggattgcgcgaaggccgttgtgtggtcgtccgtggtcctgtggaacgttagcatggttcgtggttacacggatcatagcttatatagctttttagcttgtatatatagagtatttctcctatcttgttatagggtagataatccacctacaatttcgcgaaaacaccgttcaatgcagcgaaggcgccgctcgttattgcgagcacgatccagggggatgtggaagactgagggattgactgaggcgttgaggtggacatgactgcggttgatatataactgtatatcctgtaatttatcaggctctttttataggcttgcaggctatgtgcaagtagcgtagaactcaagggctaggtattttggagtgacgttgaaggagcttgcgtgccaagactgatagtgacagataagggaggctgatatggatgatcgacgcgaaacatcacgatagctcaagtagcacttgtttgattaaaacgtcgagtataataccagtagatatgcaactaatctctatccatcactacggcgacagcctctgaactcgccatttagcacccgccccctcaccctcaatacgcacataccggaatcgatcatgcaagcgactccgccgtccttgccagaactccacagactccggcacaagcctcacaccaccccagaaaggcggcaggggaatatcttcaacacccgcaaacctctcctccatttccttaacctttgactccagtagcgcacgcccatcatcaacatccgtctgatcaatatccgccggaacaaccgagtctagcaacttcgccacactcttcctccgctgattctgctccatctgggccggctccgcagaccacaaaaccctactctgccaactcgcccatcccccaatccgactgccgcgctcgcgggtccgccaatacatctcgctctcctgacgactaagcggctcaagcaagccctcaatacggacctgacgctcaacactcgcccagctgaacgtcagcgcggcccatttatttcccgagccgacctcagaggtcacggttggctgtgagcccggttctggcatggcgcccagtgtatcggcgctctcgccgagcccgaagacttgtccgcccttgccttccctactaccccagttgctgtagacaacccagccgcgctcgtcgagttctttcaggtatacgacgcgtgcgctaacgcggcccgagggcagggaggctgttgatagggtgcatgtttctggggcggaggaggctgggagccgcgagtcgcggaaccagttgtggaattggtagaggggatccgtgccgtggatttgtgagatggttaggggtgggtttgtgccgaactggtgtgcgcgtgcggcgttcgagaggacttcggtttcggttgcggttttgtcggtggttgttgcggggattgcttggggttgggcatcttgggtggacttgttggaggttggtgcaatgtcacctggtgcgactttgggagattgatgttaacttgaggttcgtatgggttggggaggggttggtcggatcttttgcagagggatggcttgagatgtagactttggacttacaaattagcttctttggacgcctcccggcgtctgtctggcgttcctcttgggccatagttggcttgtgattgccgggttggttggttgagttggttgaggaatatcggagttggcggggttggcggggaacggtgcggaggaatgagtcaacggctgaacgcagaatcaagggtaaacaagtctgcatggaagacgatgagtgaatggcataagtgtaatacctcgaatttgtgagattgaagaaaagtccaagttggaagctgtgagttccgcagaaatcctgtaagacgttttcagcggaaactcccgaggcgtcatgccattccttggagaatgcggagtacaatagttagttatagaaaatcagacaacatgtttaacagtttaagtaattcactctgcttcattttcattttcgcgtttaaacgcggtgggagagttgagatgtctatgaacaggaataatcacagtggtatacagtgcttcaatgcacgacgccctttttgatcgccaaattaaacgccggaccttcgctggatgccaaaatatatcgtaaatccaaaaacaaataatagatatcccaccaggtatatccaactgccgccctgcagacgccgaaccggaaatatcccaacacagggatccagccctggcagagagattgtaggggtgcaacacaaacattaaatgggtatcacctggtcacatacacagccaagagaaattagagagacgaagaaacaccgatgagatcgatgatcttgccggccaccgcagaagggtatccgcgcgacatcatctcctggacgacggtggcggcattggcgtgatcatcggcgctcaggaatgcacgagtcattgcttcgtaggtgctgggctctcgcttctgaatgccaatgctgtcgtagatggccttggccttggtcacgttaccctcggcggcccagccgtggatcagtgtgttggcaatgtaggcagtcatctcaactttgcgtgcaaacatgttctggacgacttcttcggtgtcggtgacacggtggttggcgaccatggattcaaagagggcttggtagaggcatggctggaggcgcacacggcggtcggagacaacggtgtcgaagactttgcgcgcgccggcgaggtcgtgcaggacgcagcccttggcgtgcactagcgaagcatagtgcacggcatccgggtggtggcctgcggccttcatggattccagcacggcttcggcggcggccatgtttactggctccagggaagcgtgtgcgtcaatgagaagcttgtaggtgtgcagggtgggttgaatgtttcgagcctgcatacgctcgtagtaggccagaactttgctgatgtcgcgcttggtgttaaggaagtactggatcatggagttgtaaggcgcgggacgcggcttgtagttgggcatggactccatctcttcgaacatctcctcggcgaagcgttcgtcgctcacacggcaaagggcattcacaatggttccgtaggtaacacttgtcgggcgcacattgttggcacgcatctcggcaaagtacgcaagacagtcgtcaatgcggcgggccttgcctagcttgccgatgagcgcgttgtacaggaaggaagtgggctccacgccttcagcaacggcacggtgaaagaccctgagggcctcggtagcctcgtcgaaggtcttggtagactccttgagcgtggtgatgtacaagccgaaagtgttggccgagggtgcggaaccgagagcgagaagctcctggtggtactgagcagccagcttgcggtcacctagggtgaggcaagcagcgaccatggcatcaagaatcgagacccagccgtatttgacaacgctgaagttcatatcgaggggaacatcggtccgtgccatactgtgaatgtcgtgagccagagtcatgcggccagccttggccgcagcggtaatcagtttagcataggtgatgtagcgtgggtgacgaccaatgcggcgcatgttgttaagacgagttagggcctcattgaggtgattctcagtgcgcccgctggtcttctcaagctcctccgcgataatggcggatccgcggaaatcggtcgcgtgagcataaggatcaaacgattcgggagccacagatggagtcgtgatcgatgtttccgccatggagacggggctttgacgatccgacgaaaggaacatctgagaaggcgaaacggaggtctgggagcctgcctccagataatcttgccacttcttgacgacatcaggacgactgacaaagagcttgccaacagcctggtcgatgaggccagtggtgtagagatccagagggagagcagaagacagagcgacgtcaagcatgtgcgcaaagcgaacgggatgagcgacatcgaacagcatggaaccgctgctgaccaacatgccagcctgaacttggagtgccagggtgaggtcagcagccttgagctgtgagatgccgatagggccaaggttggcgacagcgtgctcagcgagaggagaaactagaccaccattctctagcatggaccacaagagtgtcatggatgattgaggcgagagaaccgcggtcgattgcataaggacgcgaccaaagagatggagtgactcggtaatctgttctctgacgaggttggcgacagcagcgtgttgatcttgggtggcgttgcggatacgcttaaacatattgcgggcctggtgaagaccttcctcgacgtttccactcttgagcaaagcgaccgcatacatagctgtcggctggaccaggtccggggttgcctgacccaccgtgttcagcatgatccacaaggaacgggcagccgaaacattgccccggcggacctgaagggccagaagtgaaatggctgggttctgtcgtacgtcgggtgcggtgggcaggctatcgtaagcctcagaagcggtggggagatcgcccgcatcagccgcagcaatacagatgcgagaaatggcctgattccgggcttcatcatgcaactggttcttggcctggtccaatgccttgctgtagtctccggtgttgagcgagtgttgcacaagtgcatcttggacaatcacagcttccaccgcagaccaccggtcctggcgaccttcggttacctcgtcgaacgaagaacgaatacgatcaaggaactgcgcggcaccctcctctttgccacatgacaggtaagcacggatcacagcagcatagacctggctgtcctggcgctgtacgatactgaagacgccactgtcatcggagacagcgagccctcggtactcgttataacattcaacggcacttctgagatcaccagtggaagcaaatgcggtgatcatggacgggaagatggtagcatgtggagttattttctgtgattccatatgggcgtaaatccggatcatatcctccaccttaccttccttggcacaggcaatgataaggtgacggtacatctcgagcgggaagacaaggcgattgtgtcgtgccgtggcggtatcaaagagtttgacggcgatggacagggaagtatcctcagcgagaaggtcccgctcaagttcactcgactgaagcatgaacttgccaggctcttccataccaccgaatcgaacgcgttcctgctccaatgcctccttggccttgatcatgtcgtgagcccgggtgaccagaagctgaacaagggtctcataggtatcttcatcgggaattacccttcgacgaagcatgtcagagtagacatcgagggccttggagatagcctgagcggcatcagggtgaagacggatggcagcgagcagcagggcattatatgccccgacagtcggagtaaatccctctcggagcagagtctcaaacgcagcggggatttctgcaaatttgttggagttggccaatcgcacaatacggtccgaagcaatctggttggcttcagagacagcttccgaaacgacggcatcctcaacagcgggttcagcattcgcttctgcccccagcgcagcctcctcggcctgtgcctgctcctcctggatctgaatctcacgggccacggcctcctccacttgggcactaacatcctcgttcacggcagccttggtgggatgaggagctaaatcggacgcagcccggtcttcgtgaatattgtcagcatcctccgccgagggcttccaaccaatacggcgcttgaactcgaactgggtccaatcgctgtcatcaccggtctgctgggcgttctgccatgcggcataataggcagctagaccgagatctccatttccagatcctccttgacttgtcttggcgccagcaccggatgaactggacgcattggagaaggcattctgtaattgggttgtgcgggagaatttggcgggttgggcagcgagcgggttgaagggggttgtcgacgcgtatgactgggacgcggcgactacggattgagcatagccatgagtaaaggctttggtgaaactctggcgcgcgagatgggtgaatggtttgaagaccatttatctgataggcaacctctttattctaaagaggtaatgctggaccacagtcagtagttgtcgatgaatttcacgtgctttttcttaccttgcactcaagataatatcgaaagtgcaggttcatctgacgactgcctgtcgccaatgaacgcgcagatgcaagattaggatgatagtattaaaaggacctgttgttgacagggccagaaatttggtgaaaagagagaaaaagagagaaagagagagagaatggaagcctgaaaaataagaacgagggaggaatacgggcttctggaaggagatggagtttcacagtggaccagctggttagggccgatcttctccggagaatcctcttcatagtccgtactccgttggatctacgtagcttttgtgattgctccgccttgttcctcggatttcctacatgtctatgtatccaagtcttagatgtttgtactggtacattgatgcattgtatctggcatatcagatcttccttataccgcgggggttcccaaacgggtcgtctcgaggatacatcgactgcaagtatccagcactcccatactactccgtaagctggattcgaacagatcaggtggtaaaagtaaaagtacgcgatagacaccaatcaacatcaagatattcgcttgaaaccttggaaaaagggtccctggaagtgagtcacgttttccttccggttctttttcttctttcctttcctcggaacttccgcctcgtcttccccggccattcaccggccattcggcctcccgactggccgactcggctttaacggagaatgacgaagcggcagaataaaagtctgtaggcggtcagcctgtgatctggcttttgctttgatttgtaacctgaaaccaacccgtcgcgaacaggggtttgcctcaccctgcgctttcccacatgacatatcggctttatgattacggtctcttcgacatagtcgacgtcagttgggggtcgattggctccttgtctgggtctgaaaatgcccaaaatcggacttcttcagttgagatctcacacggatcttacccgtggcgaggcacctaccagactctggcccggttcttaatggggtattttccggagataatagcagtcctggtggaccgattttgggtgattttcaggcccaaacgaagagctaatccaccttctgaacttgtcgagtcttcctcgtggtgcttatcctttatgagttggattgagggcacttgaaggtagtccgctaagaatagtaataaagcacactgcggtacgctttgcatgaacatacttactccctaggcaccacggtgcgatatgacagtctatgtcggatgactgggatatcaacatccggtgttgttattgaagagatgccacgaggctttgcttgctttatcgaagagcatgccaacaaataaaaacgtgcctgctgatgagggttgacgacttcccatcgcggtgcgtacacttcaccttctcacactagcctgactaggatataattattacagacatcaataccatccgagcctctgtgagagagacacctcccaaaaatagccgagaaataaaaaggcacccgtggcgatccggctggatcaaacagcacttccagcgaaggctgacgtgcccaaatgctgggcacaccgactaccgaccaaattgtccggaatgatgaaatgtaattttgcaattgctaatatcgctattagatctaaccttaacatcaaataccggtgataccggccggcagatgcatcctgcaaaatcaccaatgcgttgcgagtactgcatacagatttgcagttacttggtcatttcaaccgacagtcacgagtgagagctctatctaatatgaactcgcatcattaagataaaataagctaccagatggcctctgacactgtacagacaataagaggtagatactgcattgttcgatcatgcatcttgggtatcggtcaagaaatgggcaacgccgcggtgaaagtactgctccttagtccagcggcttgatagtttgcattgtatttcttcttatcccttaaaccgcttgaattggtgtccgcctgcattctgtatcacccggccgttcagatcgctaatcaatccaggtgatgacttcttttttcatctcttcgtgcgctcgactgccaacccagctcacctatattgcgcactaatgttgctatcctcgtgcataagatgcacctaatagccgtatacagcggagaactacaagttgtagattaccagatgttcattatatatatgtgaacactgatacctagtgctaactcactgtataatgcggctcttccctaagttatgaatcgtatgttgtacgttgtacactttatttaaactgcctctagaactacgagaaaagccaatgtgatgccagtgggtcatatatgtactgacactccacatgggcgtcgatcgacatccgtgcgaatatcacaggtggagatgagtgcacagactctgcggtgcggtcaggcggtttgccaattttctcattcatccaacctagaaaatgtctggctgtgtatacctacatcgatatagcaactatggaacatcgccacatgtatctagagagcttatgcaatctccttaggccctagagaatgaaagggagtgtccccgttccccggtatttggagtatcctcatcatccgagaagtctgacagtgtcccagttgacttcgatggggcttggggatatgattgataaagtttttgcgataaatcacccattttggatccacccgccttggaccgtgtacgatttgcaatgggcgagattgccacgttcgattggaaggtttgatcggtggttactgaggcctgagttcgatacatgctagccaaggcaaatgtccctgaaggatagggcggctttggaaacttgcccggtagtcggcccaggatttgaatgttgcaagcaggttgtccgcttctattttctatttttccagtttctattgatttctattgatttgagctaagcttttaaatgtcactgccgatctggagaacctagagtaacaagtactgcctttcgcagatggtaaacgcagaagtgagggcggcatcatggatggtcagactggagacctggtacgtatctctccattcattccattcattctcgtccgcggagagactgccacgcttgtttgttgccattgtattgcgcggaatatatcttgtttactaaataggaagcatcgggctccgaggactgctctctttatgctgggtcatagtaaggcattcttgccaagcgcccatgacatcttccctgtgttgggcaccaagtcatgatcatagcaagcgctaacctcatcctcttgattattccactcagtgttgccgctaagtgaaattagagatcgctcgacgttgccaagcaagtaacaagtattggtgcgttatgcctcaggccacaaagcccgcccttgtgtcccaaatagagaaaaccgcctccttcatctcatcttccatctagctatcaaccttgctaatctcttgttcgctctcttttcgctggtcatataagcaatattctcatccatcctcgtcaaactcaagatggaggaagatttgtcctggagcggactaaacgtcgtcacgcgttggctgagattgagaagctgatcaagaaaagcccaaatctgcatattgaaccctctgaactgaaggtggccggtatttgccacattcccttgtcccttgaagggatacccaacaccatccacaattcttcatgccataccaagaagacctgccgttcccgtcgaaggaggagaacgagctgctagaacaaaagcctaacctggatttcatcatgtgggaaactcgcgctactgagtcttttcttactagcaactttggtgattgcttgtcatatgcatcggataagtacccccataatccgccaccctctggccaatatcgagagtaagttgcctctcacagctaccttgtcctgtccgctgaccgttcatgacagacttggagattatagatgttttggtcaactgctggaatgtatcgacttcaactggtacgctgtggaagcattatccacacttcaaggtcatcctgggaagtgaagcgaacggggatggtcgactgcttcgcggagaaatcatgaccatcaccggtatcatggttggtcgtttgagatccaagaggttgcgccctcatgttgttgccccggtaaggccttccataatggatggattctaaacaatctactaaccttgctctggtagatgctggtcctgtctctcatgggtcctcgtcatgccggcatcctggaggcagatttcgacggaaagattctcaacatacgcgcttctaagttgtacgatttcacgcaaaagaacaccgagttcgtgcattcgctgacgcggtattggcttggtggcgcgtgcggcaagattgagctgtgaacctcctagttcggtggtgaagttggtttatgctggacactgcaatatggtcctgtctggcaatggaaatgcagctcttaggatatgataatgaaattgctatctcgtggacgagcgtcacgacgtctacaacttaaatctctaattgagattgcatgtgggcaaaacaaatctagtgaatttgatagccaatgagaggatgcattgtatttcattctagtacggagtactccatagttccattcctactccatccagtatgggggtggtcccgccacgatggtccgcggctctgatttgtcagtcttcgatctcttatgcggaaggcattgagcctcgctatgtatggattggctatgtatggattgctgctgtaccactggctcatgtccgattagcagatcgtactatctaatagcttggaaagcaccatcgtggagcttgcgcggtgcataaagaatccacggctttgagaggttgacaaccgacataacttctagttgcattggatgaaacatgatacaaatctgaccataacattggaaacaagtgcagcgatgctcaacatagccaatgggaaacgtaccaccttgtgtggactttctcggctaaggcgacaattggagtgctgaagttcataactacttgaatatttgtcatgaaacagtaaggaacaaaaaggccaaggactttatctccccaaacagttcgactcatctagagtgggtcccgaaggaatccaccattgaattatggccaaggttcgctaactattccgtacaacatccttcgtatatgcctgtggttcgactgagccaaagccgttgtctacagccttgctaactatcggactgccatatttacttatgtgatgcaggtggtttcaattatgtagatacaaggttagttcacggaaggatctggatcgctttgaggggtctcaaagcagttagcaatacgagccccttgtataattacccctgacattgatagattgttttaggtaatatattcctagtaatacggtaatggagtaaaagatcatgcggtatatggtacataattttatggctcagaagtatgggatcaaagtatctttttatgggtaccttctgagaatcctctgatatcttttaggaagtagaatacaaaaagaatacacaacatacaacacgagattgtattgttaacaggtattaatagagtactcttgataagtactgagtactattgacagtataaccttggaacaagcgctgatatcacgtgccagcactaggtgcgtgcataagtcgtgggtccacccacacgggtcatggtgggaatcaatgggccgtggacacccgtcacctgtggccgaaaaaggcagctccggaaaacgaaattcaggcagatttctccaactgttcttgagaaacctgaaatgcttatttgatcgacacaggtagccctcaactgctcaccttctttttcatagaggttgatctgattcatcttttcccccacttggtcttggtgtctggccatactcccgtacacagtactttgttatccaccaggcactaacgccaacggtgcatgcaggtggcttgaactatgacgtgagagtaatttcaaggtcatatttatgactcacaccatagacttgcccaggtgcatattctaaaaaccctgctttatgctacctgagctcgacataaagataccctagtaatctttcggctgaaccggagatagaagcaatgccaagggctctttataggagcataatactcgatttggagcccacgtgacccggaaatacgggaatcggtagggtctcggagttgagttttcgcccggacgatccatgtgggtcgccaatatatcaagtccctcataatctgttcaatcagctctcatcatctgctttagggttatttacttgaccttttgcttggattggtatgtagaccaaaagaaaaaaaaaagaatagaggaatagaaaaacaaaagcttctcgaaggttgccaatccgtctcaccaagttctggatcacttgaaacgactcgggaggaagttccggaaccgtgggtgtttcgacggttaatagggaagcttaaggtcttcggagattagggtctaggccgctgtaatgatgcactacgtctatatttttctttgtatacttcgtattgtatatctgacatcccacattgggtgatcaacatgtacgatgatgttggctagtcgattattatcatgtatctagatacccatatagaatacagtattcaaactatagaagtgggcctccagggctagatcggcgtttccatgacgatactcatttccttttaaggacccgcgtcatccatgcctgggcatgtcgtagtcgcgtgcaacggccctccttcacctcctccgccacaattggattttggaattcggagcgagaacggaaagccctagagaaggatggcaaaaaaagtgaagcaattgggaatgatggttcttggttatccgaatgaaaatttttgttcttcgggtctctgccgtcttaaacgggatcaaaccattattattgccgggataaccggtaagagcttcctcgtctggtgacgaaatccactatgtggctactggccatacagctgtctcggcgaatgatttttcaatgaataaagggagtgactgtggctcggagccgtagtgcttataaatctcgccagatcccctacagggctgtagccgctggttacttactacacataccccctttcccccaacctcacctaatatatacctcttttttatataataatagcttgtacaaagctctgctatcatgacgcaaacactcctggacacaccgcgccatcccgggcgcagcgaacgaggctcggagagtgatagctcgctcgacgaggtcgcgcaggagaagcagaatgcgctggtggccacactcggccatcatggcaaggacctcgacaattcggcatccccgaagcggtggaagagtttctggacggcattccgacacctgtcgcacttgaccccgaaacaagttgacgatttcatggcgtcatacgtcatctataaccttgactggtccgacgagaagcaaatgaccgaggctctgggccccaattaccaagaaaaggtcggtgattgcttgaagtcctattacggagtcctgaaccacctttgcgcactgggcgatgtcgagaaaatgtacatcccaccgtggatgagccccaagtctagcgtgctcgagaatcagatcctgtacgagcgctcaatcgcgcacgacatcggcttgaggacaggaatgaaggtgttggatctgggctgcggccgcgggcgcgtcgccgcccacatggcgcaacacaccggcgcccaggtaacgggcctcaacattgacccgaaccaggtcgagcaggccgcggccttcaatcaggagcgcggactccagaataatttcgtcacccaagatttcaacgacctccccctgcctttcgccgacgagagcttcgatgccttctaccagatccaagcactgagtctgtgcaaggacctgcccgccctgttccgcgaggtgttccgtgtcgtcaagccgggctcgaagatctccctgttggactggatcagcctgccggcttacgatcctagtaacccggaacacgcggagctcatgcgccgcgtcaagccgctcatcggcgcggtcggtacacccacgcaggagactctcgaggcggcgttgaaggaggctgggtttgaggtcgtgcggtccgagaacgctagtatcgatggtctccaggccccgcttatcgataccgtcgatgtatacttccgcaccctccgccaggcgatccttgcgctcgtcaaggtgcatgtgctgccgcgccacttcaagaccttgattaaccgtctctgtttggatggacaggctttcgtcaagatggatcgcatgcgtctggccacaacgagttatagtatcattgcccagaagcccaaggcataggccccggacaagttctctcggccatactcgagatgtgaggaagttggatgggaatgaataattttccttctcatcaaactctgcggcgatcaagtcgggccaattatccagagcacatccccctcccaccgccaccgccaacgtcatcgtcgctcctcacatctcgattggacatctcgacacaaaataccctgtacatttataatcaacggattagaaggctgggggatttgacgcatggaggagtttcggttatttatctcatttatttatttttgatttttcagaggggtttcttgagcaataaggagtttatgaagggaattgcatctacatcgggatagcagtacatgtatgtacatcaaatatatcttgttccgagtaaatatctgcgacgataagtagttacacattaaggaaggccgaacaaaattataataaaaagtttcaagtcgggattcaatctatgaaaccaaaaaaaaaaaaacaagcaaaaagaaaaggtcgtgcccgggatcgaaccgggattgctggtatcagaaaccagagtgatagccattacactacacaacctgattgatgtgaacagccacttcttttagtatcaagagactattttcatgttttctatggacacttttgtcaggtcctgcaacatccccactagtccctattaggataattccatacacccttgtaactctagaatctggaaaatgttcacgtctcgtataagctgcatctgcatggcagcgtaagcccagcacaccttatccgcgctattacaacctactcctcccccccccaaccaccccgtgaccgcggggcagtccttccataatctccaagcgccccgtagatcccggcatttttctcccccacaacaacaacaatcatatctccaacctaccagtactcgatgtctcctctaccgccttccgtcacggcactgtctgcgccgggcaaggttctcctaaccgggggctatctcgtgctggaccgcggctacacgggcaccgtgtttgcgctcgatgcccgcatccatgttattgtccagcagctgaggaggggtcaccgccgcggggtatcgggatccgagcctgctccgggcgtcgaggcgctatccaattcgggcgttgaggaccaggacggggaggataccattgttgtccgttccccacagtttgtcgatgcggtgtgggaatatggtgtgcagcgatgtgggaatggtgggggtgtcaaggttctccaaaagggagatgggtatgcttggctgtcgctgtttgcgcgaaaacatcaattgactaattccaccttgcttctctctaggccgcgaaacccctttgtcgagacctctctcagctatgcattgacttatatcagctacgttgctgactctaaggacttcgggtccctgtctgtcaccatcatggctgacagcgactactactcggaaaccgctacctccaggggcccggcgtcgcagggacgtagtgggcggtttgtcaatttcggcgttcctctttttgaagcccacaagacaggactgggctcttcggctgctctcgttactgcgcttgtctctgccttggtcattcaccgtaccatgcagccggaggatctcggtactggccgggataaacttcataacctcgctcaagcggcccattgcgcagcccagggtaaggtcggatctggattcgacgttgctagtgctgtctacggttcgtgcctctaccgacgcttctcgccgtcaatcttggaatctctcggcgatgtaggctcggctgggttcgaggagcgtctgttccccatcgtggaggactctgatcccgagcatccatgggacaccgagtgtgttgactttggcatgcagctcccccgtgggatgcagctggttctgtgcgacgtggactgtggctctcagacgccttcgatggttaagaaggttctcgaatggcggaataacaaccgcaaggaagcggacgttctctgggctagcctccagaataacaatgagcgactgcgtcaagagctcaagcaccaggcccaacaccccgatgccaatcccgaaggcgacttttctgatattcgcacccttattcagcgaacacgccagcatattcgcacattgacccgccggacgggcgtcccaattgaacccagtgtgcagaccgagctgttagacagtgtttcagagatcgaaggtgtcattggcggtgtcgtgccgggggctggaggatacgatgccatcgcgctcctgatccaggatgatcccactgtgattgtgcgtctgagagatcatcttgcgaactggacgagcacgatcgaggatgactttggaggcaagatcggtaacgtacgactgctaggcgtccagcatggatccgaaggtgcgaaaaacgaaatgctggagcagtatgctggttgggtctagcttgctctgctctattaaaacaaggcaactggtgtcccagcccaccatgacttatcaacgtgtttcggctaccagcttagccttttctcccctattgcatcctgggccggaccctccagaaaatacacaggcctgtaggataattaattgcacgaaacacagctgaaacatcgactttgactcgggtgttcctatattccacctcccctaccactccatcagtgcccacctatctgcgtctctatcttcagaatcatccccctgcatatgcactacgaatcccatgcgtggccgaggattgcccgttctttttttttttcccccgacgttcccctatgtgcgaccaggtctgtttgccaggtatttcaatatagcctggactcctctcaaggaaacgacctctacaggctaatattcttcggctctatgatacctagtatgtgagatagaatatacatagaatccacttgcacttgcattttatggtgacagtgaaacaatgaaacaatgaaacagtgataactgcatgtatactccgtattatagtcatgagatccctaatcgtcgtacagagagtacaaagctacacatgtggagaaagcgacctgtcttgtccatgcaactatccagagatgtccagatctacatcgtatcaacgatatagcatacaagactcttggcctaactaatttccccggatcttcaattgctattcgctatttactcttataataataccatagaactaaagtactaaaatactagattatgggcatgttttatttttctttgactcaaaaataggggaaacattttgcgtgcagttagggtcaagaagcctattaggcctgcagatccccttttgccttctttccttctcttcaaccaattcaaataatacaatcgaatatcatttgggggggtacatatacgtacagccactccatccacactagttgaggtattatcgcgcctcccgcttagtcttgagtcttgactcctcacatctgcactgcatctctctccctctgtctcctctcattccagctctcacagactaccacttttcacccaaacattctcccgttgacagtgccccctttcctaacggggtaaagtcaatcctcatccgccatcggggcatcctaaaatgtccacaaccgatcacccggagtcgggggccaacaccaacagagatatcaaccaacccccaaccacaacaccgcaggaccaacaacagacctcaccgaccacagagctccaagcccagacagaccttgccgctgatacatccatcccatccgcccatgaccaaacacccatgaaccagatccagatccaccccgcgactggccctggtggcgaaagcgaattcgcccccgagacaacatcaccgaccaccaacccttctcaaactttcgataacgaacctgctgtcgcgctggcaaaactgactacatcaccttcaatggataccgacgagcgaaagaacgcgcccgagacttcgaccgagcactccgatgatggctccgggaaggaagtcgaggaggatgatgctggcccggcgctggtgatcacgctgctgttgacaacggggtcgcgacatccgtttactatcgatggaaactatctcaggaagcgatcggtgaatgttgagaactttgatccgttcttgatgagcgtctacacgctaaaggagttgatctggcgcgaatggagacctggtaagagttcgacccagacccagacccagacccagacccagacatctacatggacattggatgggcaggatccatcctgatgtgggatgtcatggaacgagagtagctaagctaacattgttgttgatgcagattgggagacccgtccctcgtcaccgagctctatccgtcttatttcgttcgggaagttgttagatgataaatcgcctatttctggtatgttttttttccctccttgtggttgcatggttgctatggctatagactttgatactaacaaagcgactagactccaagttcagcaaggaacatccaaacgtcatccatatgaccgtcaagccgcaagaagtcgtcgacgatgaagatgcaaagggaaccaagacacaatacagccgggagcgcgaagcaagtgagcgcagccctggatgccgatgcgtgatccaataatctcgctgcccgatctacgagtatcaggtgtcgacggcatgcttccagcagtgttgtctgctgcttactacttccaccctgacacccaaccttcccttccttgtccgtcttccgacaatcctccaccctcaatctacctgtcattgcagtgatacgcctaattctgcctggacgcaggatcaacatccctgttttgccgagccaacatgggcactctggaaacggcgtttcgacatttatttcttctgaccggatcctaggaccatgatttcgaccggtttttctcatatctcttatttctgtgccatgttcgagccgtttccctgttctctcatcgccatatcatctgcatgcgggcctcatttatctctccatggatcttctctggagtgcttcgatgtcttctcttcgacatgtcttccgagggctcgttctgagattcattctttgcttttcgcattgctgtcaccattattcttaccccgatttctcgatatataccccctccgatccgacttccctttctctttgtgctctatcattttctctgtatggttccttttcttatggcctttcgtgtacttacgactttgtccccctcctttgtcctccttatccttccttttctcgcttttcattccttttgcttgctttttctaactgccttaaggtggttagtcgtagtgtatagggtgtttttggaggaggctgacatgtttctttgtcttatatttaataacttctaaagtgcctatatatctccgcgggcttagtgggaattgctagtcaattcgaggcagacgatcaatccggagtagtacgttgttcatgcatagtttagaaatctctataatataacggctggaagtggtcctgcaagactgcgtggtagagatagaccatggattaattcaatatatcgagagtaatacattgccttgataacagacagcagacacatcggaaatgtatcaagccaagtgatctctcattctatttgacgacataaggtaggaaggagtatgacgagggacgcaagaggagaatagtagaacacatcgacatagaagagaagccaaaagaacaccatatcatcaaagccattagaaatccatcttgagtctcttctccatctcatcatggaaagcaggcggctcacggaggtcatcacctaaaccaaccaggtcagccaaaacacatccaaaccaaaaccaaaacaccagataagaacccaacataccgtggtaaatgtcctcccactgaacctcactatcccgacctccaataacaagaatatcctcatgaacatttccaccccgcacaccgccaagcacagcaggccggaaagtcccatcgcgaacgatcttcagctccatcccgcgacgaacaggctccgcaatcccgtacgcccgacgcagtccctccatcttcaaggcgtcctgtgtcgcccgccacgagataagtcgtgcctcgagcgggtgcgtagatgtgggaacatcgccgctggagttcgtggacgacgcgtgcgcggtggcggcctgcgtgagcttgttgcggagcgtatcagggagtcccggggcggagggcgcgcctttagatgggcggggtgcttggaggcctgcttgttgccgggttgtgaggttgctcgtttgtgttgcgttgccgcttgggggggcgatgcggagggactggggtttgtgttagttttgtgtgtttagaattgggatggggtttgattgagaggttcgagatggagtttggtgatggtggtgttgggaaggtgttctagatgcttgcttatgggctggactccagggtgaggttccgggtccgtagcttgataacgtaccatgatggattgataatgctaggtttttgggttcaagactcgaaatcacagattggataagtgtaggtctgtatttaaagctcaaaaaggagatagaaaagtagaaacaagagcaaagggagggtggaagatgacaagcaacgatgatgcttaggcagagagaagcagcgcggccagctcctacgacagacgagagaaaccaactacgcaacaccccaattcaaatcacgtgccctccacttccgccggcaacaattctatcgcgacattctcgacctagcgaaaggggagacaatttgcacgcattacaccacccaaaatgtcccaattactctccccaatagcccgtcgggccctacggactctgacccaccgtcctgcggtttcctcgcccctctgccgcaccctcaccacatcacccgctatctccttcgcctcgaaacaatctcccattacctcccgcctcaacttccaccccgtcttccgtacagccgtcgtcggtttctccgccgtgccaaagcggcaattctccagctcgcctatcatccgcgctacatacaaccaggtccggcgcggtatccgcactggacagcaggctcgtcgcggtaaatcgcctgcactgaagggtacgcctgggttgaagggtgtttgtcttaagactggtgttaccaagccgaagaagcctaactctggcgagaggaaggttgcaagagtgcggttgagttctgggaaggttattactgcttatattcctggtgaaggtaagatttatttgcactcgaattggtgttggaataggattctgtagactctgttccagtgctggtttttcctacggggctttttggctaatttttttgtacaggccacaatatccagcagcatagtgttgtccaggtccgtggcggacgtgctcaggattgtcctggtgtgaagtatacccttgttcgtggtgcgatggatttggtaagtcactttttgcttctgtttctatatacctacttcccgggtgtatgtctttctagattttttactgattatactttactagggtggtgttggaagccgtatgacgagtcgctcgaagtacggtgcgaagaagccgaagaccgactaagatggatttggggatgcaggttgatcgtgatcgacctgttgtgagattatacaatattggccttgtttcatcagctgctgtataagagactgggctactggattttgggtttttatgctcttcggagagcaaactctttctgttcatatttgcatgtaacaatacggattgcgactgtttatttgcatattatctgtttcgacgttcaagctcttcaagtcaattttattgaaatagaagtataggaaatggttccggcaatatcactttactccggacccatgcaacgaaacaaaccccaaaaaaggatgaacgctcgaaaccccatagtaacacatgtcagacatcgaagtaaacctcctgggcgtaacgcgataatgggaatcaaaatgaaacagttaaaaacgtaaacctgcagccttttgcccaagcgcggtaagatcgaacagcatattgcttcatctaggtgtgatatccaacccgagtagagtagcgggtggacagagatttcaccgagtttttgtagttgcggcgcaaatgggtgacactatcagccccccaaatgcgcagcgcttcatctcaagatgatgacaaccgacccgcgcattgtcgctaaaaaggaacgactgggctatccgtgagtagacccagacggatggtgaacatagtaaaatcagtcgtatttcttgtcccatccgttcggcttctccatcttgttgatatcgaaccaacgcttggtgcctgtatcagaattagttttgcactagaagtatagattggagggtcatggacatacaagagtaatccttccagtcgaagttatctttcggttggcaggaacatctcaagtccaggcgtttcttttcatccgaggggcaatgtgtgaatgggacatggtagtaggcgatgtcatcccagaaatggatttcctccttctttaacatcagagaagcggcgatggagtgaaccggcgcatcgccccaccgctcatagaagaaaccaccgtccttgtccaaagacgtgaaatagtcaatatatgcgtcggatcgcagccactccaagctgccaatctcaaagttcgaccactgccagaaaagttaggtctgttggagattaactcaatttcaatcacttacaaagtggcagttgttgtagctttctccaccgtcattgctgatgaattccatggcatttccctctgagacatactcggggtgactgcctgtgaacttcttcacgctatcccacagggtaggaatggtcgccacatactcgaagagactgatgacaaaactatacttcttgttgttctccttcataaagcggaacggatcggagtcgacatcacagtagagctcaatgctaggctcgacgcgccagtagtactcatagttcatcataagcgggtggcggaagaagaacccagactcataacggcacatatggcggtaactctcggaaccgccgtaaatgatcttcttgcggtccatctcctgtcgcgcttcttgggccttgtcctgatcgatccactctgggtatgaccagtgttccttggggatgacaccataatgagttttgccagagaccaacgcggtggtcaatttcttgaactcttcatcgaactcgtggtcgttcaggaacacccaatcatagttgtagttgtggttgaaacggtcctcgactgttcgaatggacttgaccatgtcccaaaggtcggagttgcgcgcgagggtgacaaaagtggcatttacccgttcgccccggtgtgaaccgataacttgcggtttttgcgacttgactgagtcgtatgtgggggtcttgggtgtaggggtggttattccggtcgtaggaatcgagatggaggattgtgagatgaagaagaagaccaccaatgcctacccaacattagcaacggatattcataaatatgaaagaaagacttaccacgacggcaaagattaaataccgcgcatatcgaatagtgacggacatgatgatgtggggggggggagaacaaggatgattccccgttaagtggcaaggcaacaatagatatcagaccggtgcagttggaaccaatccaatttagaaagcgagcgacatcaatggagaatgggagagaagcaaaaatgaaaagccgccactggaaatcccgaagatgtttagggggggccagaggagattaaaggtggaaaagatgaaaggccgcgcaagacaatgacaaccgctttcagccactttgggtgtcacccaatttgagacattctagtgctcaggggatattattagggtacgggggtgggtttgtaagatccatctccattcgatcttaggggcgatgtcacatccacttataaaagagacataaaagggaaaggattctcgttgctatatgattttaggatgatatctctgtctttggttgttaaccagtgttattgttactatccgagtatatacactaagtacgtagagggccaagtgtatccccgtatactccaaagcctcatatagctctataacatctcatctccgccgaatccttgatctttctttatatatcaatgttcaaagctgcacatcaaatagacgatcgacgagttgtggcttggcaaaaagagcagcctttctgcctgaggcatccgcactccagaacttcccgttcatcgatcgcacctttcctcactaccccccactaagctattcacctccccacctctttcctatccttcctcattcagaggatggctttcttcggatttgatacaaccctacccagggaccgtgatggttccggggccaaggggttcttcgaaaacccagatccctttgccgatattgctcgagctaatgcgctaggagatgacgacgtgtgagcttatctttttttaatggggaacgggccattatacttatcatcatttaggatcgatttcgaggatacctacgatggcctcggggatcagcttcccgacgaccaggacgagttcaacgatgacacgtttggcgaagctggccccaatacatccattggcagagactttgatttcttcggaaggactgctcaggtttccgacgccattggcgaggaacaggttcgattcagcctacaaaaccccaatgtaggccgagtcgctccccagcccgcccaaattcctgttcagccggccgccacccagactaccaagcgctcaggctatgagaagtattcggatcccggctatattccagatttgcaagccaaatctagtgtatggggtgtctcgcagaagaaagctgaacccgctgccgctgctgctgccccgagccggaagatgatgagcttggaggaggtcgaggcacagatgcgttatcatggccataataccgcgacccccgccgcagaggcctttctgcgatccatggtggagcagcctcagtacccacctcagctccagcacctccagacgcttcctgatgggttccctccggtgcctccagagttccttcaggcacaaatgaaacagggccacctacccccacaaatgccacacccaccgcctggtatgccggagctctatggtggccctggaaacatgccacctggtgggccgttgcatatgatgccgaacgtcaatctacctccgcaaaacatgccgcctcttggcccgcgccacggtgtcccaccgcaggcccagacccagcgccctcagcaaccccagcaacctcttcaacatcagcaaggcccggtgccaagccgcggttccaacaatggcatgccagtaatcactaacccgcaacaactcatgcatctcacagaagagcagcgtaacacttatttggtggaggatgctaagcgggcaaagcgcaaccacaagatcttcctactgtcccgaggcaacggtctgatgaccccgcaggacaagaatttcatcacccgtatccagttgcaacagctggtcgcggctgctggaaatgtagcagattcagatcccgaggccgtgctggcggaggacttctactaccaggtctacagccagattcgtggcgcaccgcgccaacacccacaccagcctcttggtcacttcgcccagacttatctgctccagacaggtaaccggctaggcgggcatcgtcggggcaatttccagagtgccgacaaccacatgcagcgaatgcagcagcaggtccagcgtgccgtagaggcggcaaaggccaagcccaagaacaagcagctcatcatcgagggcagcttgggcaagatctcatttagcaatgccaaggcgcctaagcctatgctcaacattaagcgccctgctagctcagagggacctaagcccaagaagcagtcggatctgagtctcagcgatcgcaagtcgatccttacgaaccttgaaggtgtttacagtgcattgatggcaatggaagacatggagcgcacgatgccgccaccccccgaggaaggcgatgccgaggcaatccaggaacacatggaatggagacagaagcttcactcgcttaatcagaagttgtggcggtcattgaaggtgatggaacccattgtgcctaactcgacgacaccacacccctttatcgcattcttgtcataccccaagggcaagaaggccattcctcgcatcttccgtcacattgaccaggaacaacgtgtcactatcctcaccatgattgtcgtccacctggatagcctggatgtggtacgtcttgctcaacccgtgccgggcgaggcccagccaccactcggtgtgcgtgaggccattgacctgttctcgctggctgtcatgccctgtcttttgggatacgtgaacgaggcgccattcaacatcattattggtcttttgggattggtcattaaccaaacccacgtgcagactgtggctcgcaccaaggttggcttggggatcttgaccatgttgctcagtcgtgccgagatcgtcaaggaggccggtcaggcttccgagcatgattggcagcagtgggtcgagaagttcaacgtgctgtttgacactttagaactcggattaaatgacattttccctggatcgatcagctcgggtgacgatatgtatgtgtggcagttccttgccgccgtgggcattggcgccagtcctgagcagcagcagcgtctggttattgccgttaagtgagtgtttccgtttcgatcctagtgcagaggaacaatgctaatccatttgttacagggaccgtgtcatggaaacagtgggatacagcaagacccttcctgccgatatgggcagtcaacgtctgaacaacgtcaacctcttcatgcgggctattggtctggacgttgagctcctgggttaaaaaggctattctatttctgagcctccatgggtatatacccttggcatgttagacaccacttctgtgccagctcgtccagacttggatgaatgagcatgagccccgaggccccgaggcattgattactcgatggtctcacggggcaatgttgctgaaatgcaacacactatctaccacatctccagggaatccggggccctggcaaaaatcaggttgcattaatgtgcctgaacccggtttattttacttttttccccaataccaatttcacttcaatgttctatatttaatgaacacagtaaataagattttgccgagagttccccgggaacggactgccccttgcatatgtccctattcggcagggttgagccgacgttgtttgcaggcaatccgggagtttcagggaaatttcggggattttccagggatcttctctttgcatcttcccacatctctgcccggctttgcatatccttgcatatccttgcccgtttcgagactcagggctgttttcaccgccacgctcgccatcattacacatacttgatgtacataatgttcgcgtcaacaatgataacctcacttggaagcgaaagggaaattagaggtgcaaacatgtagatcagtgggcgaaaatgtaaataaatgtaaaacaagatgaatatcaaaccaccaggccgcatcatcgcagatccacgtggtgagggccatcccgcccttcaatttccccttaaaaagctgcccctcgtccgcattctactccgtactctccccgtactcttccccatctccctaccatcaattattacacggaatttaatcatgtctgctggttctgttcttgttgctgggtaagtggttgaattacctatttgggatcttatagtgagctaattccccgcaagtggcacgggctacattggctcgttcaccaccctggccctccttgaggctggctacaaggtcgtcgttgccgacaacctgtacaactcttcagtcgaggccctccaccgtattgagctgatctgcggcaagaaggccgagttcatcaagctcgatgtcaccgtggagaacagcttcgaccaagtgttcgaagctcaccccgacattgacagcgttatccacttcgctgccctgaaggtgtgtacccgatgaattaagaaagcataaatcgtatacccttcgatccagtagctgatccaattgtctttatccaggccgttggcgagtctggcgagaagcccctggactactggctggtcaacgtctacggcaccatcaacctcctgcgctccatggtgaagcacaatgttaccaacattgtcttctccagctccgccaccgtctacggcgatgccacccgcttccccaacatgatccccatccctgaggactgccctctaggccctaccaacccctacggcaacaccaagttcgccgtcgagaccgccatcaccgacgcgatcaacgcccagcgcaacaatgccatcaaggcaggtaacgaggctgaggccaagaagtggaacggtgctctgctccgctacttcaaccctgccggtgctcaccccagcggtattatgggcgaggacccccagggtgtcccctacaacctgctccccctgcttgcccaggtcgctaccggcaagcgcgagaagttgatggtctttggtgatggtatgcaagccccttcttcccattattgacactccctgatctaacaccatcatagactacgcctcgcacgacggtaccgccatccgcgattacattcacattctagatctcgcagacggccacctcaaggccctgaaatacctgcgtgccaacaaccccggtgtgcgcgcttggaacttgggtaccggcaagggcagcactgtctacgagatgatccgcgccttctctaccgctgtcggaaaggaccagccctacgaggttgctccccgtcgcgctggcgatgtcctcaacctcactgccaaccccacccgcgcccacaccgagctcggctggaaggctgaacgtaccctcgagcaggcttgcgaggatctctggctctggactaagaacaaccccgagggttaccgccaggagccccctgctgagctgctcgctcagcttaagaagtgaatttagttcgggtactgatgtagcacacgtgaattgtggtttgtaatgatcttgtctttgttgatatagaagtcgtggatcttgttgttagtatacatgaaacgaatttcctttttgtgatgattggtctataaatttgagcctattctctgttcacggtagaatgtagcccttaactccgtctatatatcacaccatacctataaaacaggtatacacatatctcactcatttctgagccttgcgactcctcctcgacccatcaaccttcttccccttcttctcggccgcctccttcttcaccttctcagcctcagccttctgcttctcgacctcggcctccttcttctcaaaagcccttataacagcactctgcttctccgcctcctcaaccatcttctcactgaacccccagagcttcttcccaacctcatcattgcgcacatccacccgcgcataatccatctcccgacactccttaatgaaccacccacccacaccccgcccatactgctgctccatcgccgcatacagaatgctctgcgcaccctgaacaggcgacttaagtagcagccaccagagaggccaagtgagcaagtacaaccaaagaccccacaacgacccaccagtcaaccagcgccgcatgcccggagtccgcgtcaccccagggtcaacaacgataacccgcgtacacggcggcagactatccggcctcgcgtaagcattcaaatgccgctggaacgagtgcgcgaagatagtcagcgcaagcttgctgagcgcgtacacgcccttgggctgcgcgtacagcgccggagacgtcttcgtgcgcttcgataccaccttctgcttcccgcgcgccatggagtccagatttttcaagtcaccgccgatatagccggagcatgttgcgaagatgacgcgcacgtcgcggtgtgcgggctgcgcgcggagggctgggctgaggatgctaaggaggtggaagtttgcgaggtagtttgtttgccattctaggtcaatgccgtctattgttagggctcggggtttggagggctcggctgttccgccggcgaggattatgcagtctagtcgacggggtgggatgttgtcgatccattttgttgcgaagaggcggattgagtgcagggaggagaggtcgacttgttcggcgtagatgagagggttttttgtgctggtgcggaggtcgtcgatatattcggagagatagaggtcggagggtggttggcgggttaggaggattacttgggcgccgcgagttgcgagcccgcggactacttctgcgcctatcccggaggtgcccccctggatttggtttttgtcagcttggttgattgggtagtgatgtggtgctggaggggtgttcttaccgttaccattatcacttttgatcgcatcattcgctcggagctgttgcgggctccttcaaaatagtatttcagcgccgcgagggctagcacccatggtgctatgcggaggattgtccaagcatacgggatggatgagacaccatcccgcaggccctgggcaatgatagggatgggcataattaattgagaaatgaagatgggaagagagaggacaggtgtgtgtctcctaagggatttctccaatgtacacgtatctccgcttatcttattccttatcgccaccctctaattccgctccgcccctcaaccctctttcttccttctttctttgccttgacagctctacaagtaccaaccatggcctctgaggacgaagactatttcctcccaccggagcagcagcgccccttcagctccggaatccgccgcaaacgcgtgcagttcgtgcgctcgtccaatctagacaccacaacagccccaactccctctctctccgggactagcatcgcagacacatacctctctattgtgatgggccaatcagccccaagtacatcaacacatacaccaactcagcgcgcagaatcaccaccaattcgtacgcagtccgcaccgccaacttcagacatattcccgcctccatccacagtggcgcccgcggcccaagaatactgtgacgtgtgccagctacctctcccaccacaagccccagcggacacaacagaccaaaaacttcgcccgcacgaagcctccctcgcgcatcaaatctgcctcgctcactctcacccgccatcgcacctcgaccgcacgcgcacaggtctccgatatctctctacatacggttgggatcctgatagtaggcttgggctcggcgcttcgggtcgtgagggtattcgtgaacctatcaaacctcgcgtcaagcatggtacggctgggttgggaactgggcttgatcaggatggagatccgctgccgcctagaccggcgccgccggtgaaggtgcagaagcttaattccaaacaggcgcggaataaagccgcggaagataagaagagggcggaaaggctgaggaaggctttttatcagagtgatgaggttttacactatcttggggaggggatttaggtcgtggattttatggatggaggagagttggataccctcattttgtttgttttttgtgcttgatgatacccctattgttatttgttattctttaaatgggtagcgattagaacccaaaaacgctgtcaaactatattcaattacaaaagtaagctttgtcaatcaaagcgttactttatataaaatcaagaagccctccgagcccgcttaattgagcgatcaactaggttttcaaagcctactagatcactatacaatccgccgcttttctcgagaaagaagtaagcgaattacgcaccgccaataagaagcagaagcactagatcccggaggcagatacccgccgaagaagctctctcagtctcagaagcctctatattaattatacagcaataggaagcaattgaggcacctgcctccagtcccggtacaacttaggaaacgagatacatagagatagaactagagatagcccaaaaatgacatgcgttccttgggaaaccatgccgaattaaccactgccagtaaaatccatttgcccaatctgccattcatccaataaatcaaatcctagaaaatcatcatagagcaacggattattctcatactgctctacctgtgtatgcagcgaagcgtctgcatccaccatggtgttatcttgtacttgaccgacactgttgggtggaatcaagtacagatttttcttggcaagaatctcctcgaataatggcagggctcgtttcagggctggtatttcttttccctgtgtgagaacaagcattgtctggctaatagagatttgggccatcgaacgaacaagatctgtctcggctgtatcgagggccgattcgatgtgtagagcgagcagtgcaattattgtggttatactggtaagtctatcgttagatatccatatttttgcgctctgtagatcgggaaatggggaaaagagaatggacggcacatacaaagatatgggaaagtcctggagggtaccactcgccagaacccttttggtaattgtgtccaactccaaaatagcagaccgaagccgctgtttgacccactcgctccagtccgcatgatgggtctgctgccaacaacgtcgtatcaatcgacacaagatgcattcaaatctgtagcccatggcttgcatagccagatagtacacatcggttccaatgttctcattcatatgcatcttgacagggagtgatttgcgccatgaatcaagcgagtgaaacatctggcggggatcttgctgtggcttggttgtcacgttggacaaacactgtccgactaaataagagtcagccatgcttgtggtttcagttatgggttgatgataagaaggatagagcgtaacaacaaagaatcgaataaaaccagcacctacatattcgagacaactcgcattgaacaacaggcaaggccctttgttgaggcgtgactggtgatagcaagtcagatgatacttccgagctaatctccacttcccagtcatcttccgtcctcagtctgatcgtggaggtagtcgcgagtagtcgcgagcgtctagtattgacagagacatgaaaaatgtctaaagtctacgtagctacagtaaacataatgcaggaagaacagaacatagtgacgagaagaaggacgtacgtagagagcccaccagatccttctatacaacttgaagactgtaccagctttgtcttctcgagcacacctgtggaaaaatccgtaggcagttaatacccgcaatactcattccaggtgctatagtccaggagtaggaaacgtacacgttgcgtatgtcaagcttagtggcaagacggattgcgttgtggaaccagtagccaaagtctcggtcggtagggtggtcgagaatcaccatgcacaagatgatggatccctgcagcatcaacaatgggtcatcttcagcggaaaagtcgtgaagcagcttggccttggaaaaaaacaactcttgcgcggccgagcggctagcaaagccgcaggcggatagcacgtctgctggcgcatggacactggccggtgccaatatgacgtatagcaagaacaatgagcagtggccagattgatagccgcggataaaatcaactctattgatcaccggagcaaaggggtagacgtggtcaaagtatgtcttaacgagggaatctctgttatgatttgtcagtgagtagaggcaaatgcgaaaccccgaataagatggaggattataagcttggtctcacaggtagcgtgaaggaggtagatcaaatacccccttcttggcaagaaattcgttgtcaatgtcgtccaattgaggttgcttggcccatcgacaattccgagtactaaaactatattccgggcttgggcggtagggagtgctgaaaatggggtggtgtcgactagattgtgtagtcttttccccggcgtcgtttaagatattgagatagaacagatctagctcagcctgacgtgggctttggccatccagatcggaagtcgaaggctgggccgactgttcgagtgattagattgattagatcgattagatcgattgagattttgaattggaacactgtcaatcatctaaaacatactcgtacatgatcagggatcggtgaaacatggtttaatttccttggagcccatccaagttagcacgcgcctaaaagctactaggataaaccatgagccatcctatcattaatcaactcacctagcacgacccttacggaccggtagtacacagtccttgacacactgcctgctggtacaacagctgcaggggaggccaatctcggcggcatcgcatttggtcttgcgtgcacggcagggcacacatgccttattggctttgagggcacgctttccggcttgtccggacaccgcggttggcttggccccagaaggattcatccgggagaagtgtgtttgttgcagcctcggaattgcacggacggggtaagctttgttttaagtctttcgaggctcggtgattcaagttccggtccgatcggggactcacataatccttgaattcagccatggaggccccccatttatattcccggttcccggccgcttcgtacatgtaaggagtttctatgctacattatagatttattgaaataatcctgctgtacaattaagtttatgttgccatccaagctgatttgggggcgtagcagatcccccgctatttaatgtgatctaaacagtctcttcaaccttactctctagcccatttggctcacctacaatcatggcgccttgccgacggctcatcgtctccagcaccttagctgcttcgagggaatacttgcacttgctgcgtatctgcgggccgtacttgtagaaaagaaacgggaaaggcacgcacgcaagaactaggaatgcaggaatggagctcgcccattgatttccgagcttctcgtacatttgggtggtaaacaacggaaacgcagtgccgaacaaggaccgaaccactgagttggctgccataacagaagcagcatagacggtatctttacgcaggtgagcaagtgcattgttgcataaggtcacggagtaacgatcaaaacttacaagagtcgatcaggtagctcatcagcgagatgaagaccatgacgagtccgcacgagaagaacacggcaccgataatgggtacaatccagtgcaccgatggatacgtcgtccaggcaaacatgaacaatccaatcggaaccacgaaagagcctaccatagccgtactcagtctggcttctggctcgactgtgcctcctcctgcgtcgatctccttgcaaagacgcacatagcgtttgttgtctacgccggccgccagcgtggcaagacagacgccaatggcgacgccgataaacggaagtccggcgatgccctggctccagcctcgagtatattggaagaagataggaaacccggcaaaaaacatgtaaagtgtgccatagatgatggcgacgtacagcgacgtcagcaagacaatgggctcgcggaacaacaagatccaggggcgcgtgagagagatcaatagctcctgcgagaaggtcttgggcggctttcccgcattgatcctagacacatatactcgtcctgtcacccgggaaagggcttcggctcgacgttggagaattaacggtgcgtatgtttcgggggtgatcagcatcgtgataatcgagaccacgcctgccattatagcgattaacccgagaggccagcgccaaccctgtttctcagcaagaaaaccaccggcaaggggccctaaaatgagaaacaatttagtaagtttcaagtgtatcagggcagaaatggcaggaaatggcaacatgtaagaagggcatcttccaccacttaccaagcgcaggtcccagaaaaggagctgtgacaaaaaatcccgttgcgactccgcgctgtgtcttgctaaacatgtcggcaatgacacccccggtattggtcatcgacgacgaaccaaatgcgctagcgaagaagcgaagaaccagcaaggccgcgatattgggagagcaggccgccgccacgctgaacgccgtgtacgccatgaacgaaatcacatagatggacttgcggccatacatctccgaaagaggcgcccatatcagcggtcctacagcgaaccctaacacgaagagcgacaagcccagcgtggccacctcctccgacacgttaaattgctgctcgatgcctccgatgccgctcacatacaccgagctggaaaaggtcaccacaaacgtggatagagactggagaatggagatggcccattttcgcccattggaaaaattcatggcgtcttggtggtcattgtgcaggtaatcgataatgtatgggtcatcttctgtacctttaccagtgtaattctggttgcagacattgtcgttgaggcgtgcgtggaagaaaagatattggatccaggacatgcgtcgagaggatgcctgtgaattcttgacttgctgagggatctcattgttggagacagtggcctcgggaacgacagccatgttgggaacgacaggaagaacagggaagcaagtgttaagattcaagatatagacggagcaaaaccaactagttttcatgcttgaactgtctttactaagtaagtatacaaatcgtgcgcacagttattggttatatagttcatctcggacattcgcaatcggagtttcagcatggcgatattgccgagaacaaaagcccgcggcattatctgcggaaatatattttcttgacacacgacaaagttgggcgatatcgccgaagtgtatgcatcggcccagatcaggatattttctaagctagctagtgatctgtaatccacaggcttccatatgcttgtggacgtggtgtgccttttaatagatttcggccccagctgttgacatgatatatgtgactaccgctggaatcatcgattgttcgaggacgacagttgctctttctctatagaagtctctttagaaggaggaatatcccggaaatttgtattgtctagagcctgagttgatctaggctattaaaagtgatgttatcaagaactaaattgattcgccctagtcgtttctggccttaggtcatttttggcgtcaatcccacaggtcctgatattctagttgtactgttgtggttttacgtggatatcagttttgaatgagatgcaatgtttgtttctgtctaaggcttgacttgaataattaccgtgtactaggtagtgcaacttgaaactgtgtccagattctacctagcataaattggagtgtagtgaaaacattcccatgttaagtcttataggactcatcttaggagagaaataaaaaaccgctgagaatagcgccttgaatgctcgggaccagacctgaccaacagaaagacaaggaacagaatggtatcacaaaagcgctgaatgcagcaggacacaagaaacagggtggaatcaagaggaatggagaatggagaaggctacttgaagaaacggtattttttctccttcttctcctttttctctttctccttcttgtccttatctttcttgtcaggcttcccgctgccagatgaggcagggctgcttctgcttccgtttagagacataccagccatcagcgcctctggcggagctggggggttgaggtgtgccgttgacacaggcttcttctgtggcggcggattgggggctgggggagcctcgcgctcgaagagatgggccggggcagtaggtttggggcgctcggatgggaggtcgagacgacgccggtcaacaccaaggtcgcctacctggcggaggaagagacctggggtcagcatgtgcgtcgtggcaaggtagacgtcccggttgtatgccgctgagacttcataacaagctcgtgactcgccgtaggtagcaccaccggccatgaagacgattatgcgttgtcgaggctggtcgacggatcttgtgcgcgcccaggtgggttttgcgctgcgcaaagaggcctgctgtgactgtatttcctgggcagctatggcgccgtcagtctcggtgtgtggacgtgtgaaggggaaggtagtcgcgtccagattgccctgaatctgatcttcaagcatctgcttgatagctaactcataccggctcaggctgagctcctctgattcgggtggtgggtttcgtcgggtgaaaaggggctgcactggtggcttttcatccttgagaggcttctcgatacgaactccaaggagttcgaggttggcaatcaccccgccgtcttttggcgggagtccagcatgcgccatgagtttgcgaatgtcaccacctaacaatccgccgcgatacatgatgtacaaaagtatgagtcgaagccgatctggttgtacgactgagtcgtcatcgaggagctgcacgagttgccctgctaggttctttgcctttttgtagttctcatccaggcccgtggcgaatgactgctcggtggagctcacttccaagagtttgcgggactggaagtagttcatacactcttgtgccatgttgaggtgcagcgtgtaggcacttttaccctcttggaactctgtcagtccgcccaacatatccttgatggtgttcacattagacttgtcgttactaaaatctcaagttagtggtccgtgtatagggatggcccgttgaaactcactcgtctgcaaactgagggtgcgctgctcggaatttggcaaagtcctcgcccagtttcccaagcacatccttcatatgcatatggcggtaggtcacccagactcgatcatgctcgccaatttccatctccttgacctcctcattttggtttccctggttcaaaaccgttttgtaggtaaccttgtctccatccgtgacaggaagaagatcatggaccatagcctggtatgtaaactcgtgaatgaggggcgcgaacaggtccatggaacggtctactacgagcagtacgcctcgggggcggtttgtttgaggcggaaagtcacgctgatgctgcgcgaactgatccaattcgttctgaatgaaacgcgccaagtgagaacacataactccagcctcgtgagtcggagatcggggccgatagtaccgaattatagggtattcgcctaaagaagcgcaaagagataccacctcgattcaacgtcagcaagcccaattggcatacacggatagcatcttaccttttgagccaattcttccaaatgaccccgaatcaaattgttgcaactcgggtggaagagcactgggaagctccacggatcccggaatgtgatcaaatgcgattctctggggtagaaattgatgttcatagtgtagaagtccgcaatgcgctcgcgcgctatttgggaccggtcaatccgagctcgctgctgcggatcgagggctataggctgtgtgagcggaatgacgtcgcaaaggcctcgggttcaccagcccactaacatgaagtccacaccaagaatgcctttctgtatcggcccacctcgaagtctgccatcagacagtcgaccacgtacgattccggggacaatatgtacaacgcgtccatatcgggattggacggtcgtcgatgttcgagctgctcgacgtctgcggtgtggcattagtgacatcgtttgggtcgcaaagcacaagacgagctcactggagacattgagattgagaatttcctcctccttcacagcaccgtagaccaatttcttgctggtctcatctaccaccaagactttccactattagggggagaatgccgtcaatatccgcggtagaggggttgatcgggggagggggggtgggctcacctcatcgccaccggaattgcggattgtgttcagtataactattccagacagttcaaggtcagccaaggttctttgcaagaggtagtagaagtagtcacccacagtcgcgttgaatgttaattatcgaggagcccatgctggcgggcagccctggggcttcagaatgaggattaggacaaaaaataaagaaaaagagaaaaaagataggcaatagtaaaggagattgacgagatgttcagttaaaggggaagagaggagtgtcaggtggccgtctgaggtatatgaagggaagatggttttccccaccattggagcttgaaagtggatcggctcgataagggaactttttggtttctcctatgcaggttcttgttctttatcctctctacctttctcttttttggcttcggttcaactgttcggccttctttgttcccaaattgttcctctctacgggattggagtccccgtcgtccaggaatgcagccatggactagcggtagtcgttccctctatgctttgcggcccttgactcgttttgctgtacggcccttcaccacaacctcgattctgcagcgctcgaaaaaggtcaaaacatcgccggacaggaaagcggacacaaaaaagggcaaaacacttgtggggaatcccgccgggagatccatccgacaggatattgcggccgcacgagatttcaacgaactcgtggaagcaaccctacgcgatgtatacagcaagttgaacaaatcaggcgaatcgctagaaggatggacccaatttgagcgccaaatcaaaaacgcctgcaaatcagatgataagaaagcctctgcacaatggggaccccttcggcatatcaaggtagcgctgcaaaaagcctacctggcatccggacttcagggtctgcgggaggaggtggaatacatgcagtattcggaaaacatcactgccaggttttcggcacccatcctggaagcacagcaagaagtggccgaccttcggtggccagccgagtggtatccgcgcgcacgatcgatgcagcgaacaatccatctccatgtcgggccgacgaattccggaaagacctaccatgcgctgcaacgactggcgaaaagcaagaacgggttttacgcaggtccgctgagattgctcgcacaagaagtatatcatcgattcaaggcagatggggttccatgcagtttagtcactggtgacgacgtcaaatttcccgaggatgatcaagtaccgcgtattaccagtaatactgtggaaatggtcagcctggggcaggaatacgatgttggcgtgatcgatgaaatccaaatgattgcgaactcatcaagaggatgggcatggactcgagccttccttggtgctcaggccaccgaactgcacctgtgcggcgaaacccgcgctataccattgattcgggagctatgtgcactcacgggagatactttggaggtccaccgctacgaacgcctgaacgccctggaagtgatgccacatagtctaaagggtaatctcaatagccttgaaaaaggcgactgtgtagtcgtattttctcggaaaggtatacacgctatgaaggcagacattgaaaagaccaccggaagacgcgcagccatcgtttatggtggtctgccggcggagattcggacccaacaggccaatctgttcaacgacccagacaatgactatgacttcctcgtagcaagtgacgcgattggcatgggtcttaatctgtaagttctgtgctccctggttatatttacgctaccatactaacccacgataggagctgcaagcgtgttatctttgacactctcgtcaagcgtgtcccgactggacttcaacggcttactgttcctgagatcaaacaaattggcgggcgtgctggtcgatatcgtccagccaatgccacggaaagcacaagtgaggagcctaacgtgggcctgatctcctgtctcgaagaggttgaccttccatatatccaacaggctttgaagttggagcccccaccgctgagtgcggcgggcatcttccctccagaatctgttttccggaaattcgccgcctatttcccaccaggtgtacctttcgaatatctgatcaagcgggtcctggacattgccaaggtcaaccctttgttcttcttgtgtgaccctagcagtcagttggagaacgccgagattatcgacactgtcaaaggactgccgtttgaggaccagttaaagttcatggtttctccaatggaccgtaaaagttcaggctcgcgtgatgttactggtgctatggcggactgcgtagccgaacaccatgaaggacgacttctagatatcgcccatctcaacctggaagttatcgagcagcccgtttctggcagcaacgactatttgcatgatctagaaagccttcatagggcagttatcttgtacctgtggctcagtttccgattcggtggtgtcttcactgaccgaactctggcaagtcatgtcaaggaacttgttgaagagcgcatggttcgggcattgaccgagttctctgccaacaagaggctgcggaagggtgcttctctgaagcgccagattgcgctgcagaaacagttgttggagcaggaacgtatgggagttgctggagactggatgaagccctctggtgagggagagcagattgaaatcaatctgcccgaagaaggtgcttcagaggctgcggaggctgcggaggttgcggagggtgaatcctctgacgccgaactctcattatttgaatcgtcaccggaggcagagggcgaggaagagggcaaggaagagggcaaggaagagagctcatcacccgactttgacgactcggagcctgaactaacagagtcatactatgacacagaagtccccaaagagtgatgaatatgtacaacaagaaatatgtatattagatgtataaaaccgatctccaatactcatacctaatacctatcaattatttctttttgctcaattgtacgtatttttcagcttgcattcacatattgattgaacatgttggaagactcccaataattactattacatctgcataaatggatgatgaagccttgccaagagacagggctacctcgggtgaacctagcgctcagctcaccgattttgtgccaaggatcgccttatcttatcggtggcaacttcggccatactaattttccgccatcaagatctccgaagagctacagggtagcagtgttttgcgcgctcgccaattttcacgttacttatccagttttgctggctctgtcttttatctggttggatctcttttgttccaccgcccatcatggatgacctcgagtctctggagctgttctcgctcgtctcgcgcgtgacgaacgagttcgagaaccatctgggaatcgccgacaagactctcgcagagttcgtgatcgatcagcacctcaaatgcaatggcaagttttctgaattcaagaaatttttcgacgacatgggcggcgaattcccgcagagtctcctggaaagtgtcgaccgcatggtgctcacgatgcaccccaaatacaaaggaaagaaagcggagaacggcaaaggagcttcggatgccaaagacgatatggatttgcttgatgctctggagcaaaaatctcgcgtgttcaagggccttgcggtccccgatacggagaagcgctgggaggaagaagactacacagatcctcaaggcgcagacgaggccgatgcacaggcaggcgcgatggacgacacttttgccatgctcgagggactggcaggaaaagcgaaggaggacaaaccgcatgcgccgagaaacgatcgcggaactaggaagcggagccgcagccccgagaacaacgattacgaccgtggacggcgcagagacaaataccgctcgcgatcaaggtctcgaagcgccccggggtataacaaaaacgatgatcttgtggacgagttcgggagatcgattaggaaatatggccgggaagacagccgtcgcaatggccatagtgaccatcggagacaccgtggtcgcgacgaggataatgatttccgtcgtcctccgcctctcgagctggatgaccatcccgttcttttcaaggtctatgatggaaccgtgacaggtgtaaaagatttcggtgcttttgtgaatctaaagggcgtcagggggaaggtggatggtcttgttcatgtttcagcaatgcaagaaggagcacgagtgaatcatccttcggatttggtctcgcgcggacaaccagtcaaagtcaaagtggctagtatcgaaggcactcgcatcggactgtccatgaaggaggtggatcaagtgacaggcatggatcttgttccccagaagcgccttgcttctggtgcaaatatggaacgcctcgatggtggattcatagatgacaagtacggcagcctcggatccgatgtgcccgttattgaagggtctggaggtcgaccaatgaggaaccgaaagcgcatgacttcgccagagcgatgggagattagacaattgattgcctccggggttgcctctgcagcagattatcccgacatcgacgaggaatataatgcaacgctcaccggcgaaggcactttcgaagaggaggaagatatcgacattgaggtcaaagatgaggagcctcctttcttggctggccagacgaagcaatccctcgaactttctcctattcgtgttgtcaaggcccccgatggctcaatgaatcgttctgccatggcaggcactaaccttgccaaggagagacgcgaactaaagcagcaggaagctcaagacaaggcggctgagaaggcggcagatgttgatctcaatgctcaatggcaggaccccatggttgcaccggaagagcgaaagtttgctgctgatcttcggagtgcccagcaacccaagcaggacgaggctgtaccggagtggaagagagtgacgatgggcaaaaacgcatcgtttggaaagcggacaaccatgtccatgaaacaacaacgcgagagtcttccagtctacaagttccgaaagcaattgctggatgcagtgaaggacaatcaaatgatgattgtcgtcggagatacaggttctggaaaaaccacgcaattgacacagtacctggccgagggcggatatggaaacaccggaatgattggttgcacccagcctcgccgtgttgctgccatgtcagttgctaaacgtgtagctgaggaagttggttgcaagctcggagcagaagttggatataccatccgtttcgaggattgtactagcccagacaccaagatcaaatacatgaccgacggaatgcttcagagagaaattcttttggatccagacctcaagagatattccgttatcatgctcgacgaagcgcacgagcggacaatcgcgactgatatcctgttcggactgttgaaaaagacagtcaaacgaagaccagatctcagattgattatcacctctgccacactggacgctgaaaagttctccgaatacttccacggctgtcccattttctccattcccggtcgaactttccctgtcgaagtcatgtactccaaggagcccgaatctgattatctagatgccgcactcatcactgtcatgcaaattcacttgacagaaccgcaaggtgacattctgctcttcttaacgggccaagaagagattgatacagcatgtgagatcttattcgagcgcatgaaagctttgggacctactgtccctgaactggttgtcttacctgtttactctgcactacccagtgagatgcagagtaggattttcgacccggcacctccaggcggacgtaaagttgttattgcaaccaatattgctgagacctcgatcacaattgatcagatttactacgtcattgatcccggttttgtgaagcagaatgcctacgatccgaagctcggcatggattctcttgtggtgactccaatttctcaagcgcaagctaagcaaagagctggccgtgccggaagaacgggacctggaaagtgcttccgattgtatacagaggctgcctatcagtctgaaatgcttccaacaaccattcccgaaattcagcgtcagaacctctctcacaccattctcatgctcaaggccatgggtatcaacgacctcctccacttcgatttcatggacccaccgcctaccaacacaatgttgacagcactcgaagaattatatgccttgtcagcacttgatgatgagggtcttttgactcgacttggacgaaagatggccgatttcccaatggaacctgcgcttgcgaaggtgctcattgcatccgtggattcaggctgctccgatgaaatgcttagcattgttgccatgctatcaatccagtctgtcttctaccgccccaaagaaaagcagcaacaagcagaccagaaaaagtccaaattccacgatccccacggcgatcatctaaccctcctcaatgtctacaatgggtggaagaacgcaggcttcaacaactcctggtgtttcgagaacttcatccaagcacgacagatcaagcgcgcccaagatgtgcgccagcaactactaggcatcatgaaccgttacaagcaccggatcgtctcttgtggccgagataccatgaaagtgcggcagtctctatgtaccggcttcttccgcaacgcagcacggaaagacccccaggaaggatacaagaccctggtggaaggaacgcccgtgtacatgcaccctagttccgcgatgttcggcaaaccggccgagcatgtcatctaccacaccctggtcctcacaaccaaggaatacatgcactgcaccactgctattgagccgaaatggctcgtggaagcggcgcctactttcttcaaggttgcacctacggatcgattgtcaaaacgtaagaaggcagagcgcatccagcctctgcacaaccgctttgctggcgaagacgattggcgtatctctgcccagcgacgccaaggcagaggtggtggtggtggaacttggggttgatttttgttatgtttccaatataccagctatgcttgcaaccgtgtgttattttctgtcttgcgtcttatatctctctatcattgtatttttgcatgaatcacttagcttaaaatatcggagttggttttttttcgatctgggaataatttactggttgtgcattaaggtggcagtttgaaagaatatcctacttgcaaagagcatttgtcgtaaatatgtcaaaacctcctcctatctggtgcagagtatcgcagtgcaattactcgggactttggtattttctctagtcaactcggagcaatatagaataatttttcctacgaatgagattgaatggtaagtgaccaaatgttttagaatcagtttcaagcccgtttgacactcctagatacacgagttcatatccttcgcaacaacccagtcatcactcaaagtggaattcgtctggtcatgtcagtaggttcccaggagcagtatagttgtcaaatagtcttctagcctacacattcttcctcatttccatgcttgagaacttcgggtgtagtgccagcagtggttgttttggtgttattgctcttatacgcgtcaattgtccagcctctgactttcgtgattgcgttaagctggcgcgtgagggtctttttacggtggacgtccattgccataatcttgcactggatctgttccttaagcgtctccattcgagatgtctttctcatcctctcctggcacaatccaatccatttatgagaagctgcgttggtcatctcgctgtccaggaccgcgatctccttgacaaggtcgttcagctcggccatttgggctttgatgacatcgctggtgttgtatttcaccatggtgaaaacaatagtaacgatgcagagtaaaagtcgtgaagaggaggataattagaggaagaagaggatgaggtgatagaaaagttagtagggatggaaagaagtgaatagaagaattgaatggtataaatagcccaagaagctgttttccagttggcaggatgggatgggacgcgtcttagaaatatatcaaatcatcataaggaagtgcacaccaaaattcaggatcaatatgtggtagcaagagatgagcaatgcacgattacttgctataaaataaagaacgaggttcgtaatatacgttgtcacgcacctactctacctgagatggcttgcgaacaagaaaatacatcaccattggctccgttccaccataatgcgaataatccaccgataccgtatctaccagtcgaaagccaaggctaagatatagcttcaatgcagccggttctgacatcacataggtctttattccttgtcgacctacaactcgctttgcacgagcattctcccgatgcctcggcgccagaaagaagggtctgtcgtcaaataatcaagagctggggagtactatctatcagttatcagcctgctagtgatatatcggtgtgcattttactcagaaatggtccatctggcataattcgaggggctgcttcttcgaggggtgcactgcaataacgcatcatctcccggtccttcaagcctataggccgtccactccgggtgttcgatcgatactgtttctcatagactgcgcgatcggcggaagtcccttcggctgcctgtgcctccaaccaaatatcgcccttctttgtgagaattggacatcaaatactcgatctagccccttttagccattgtggccaaactgattgctcggaagccatgcagtatataagatgataatgatcggtatcaaacacaaaaatcaacagctttccatctttgccaatgccgtatgacttcgataagcaccgataacctcggaattggggtgaaataagacgaacaagtcaagaatcaaacgcaagaaagagggttgtatgcatcgggggccattcatatcgccgataatagtagaacaagtgtcattaccatacagagcactctctagcagcctggctaagcttttatttcaacatcatattaaggaatggaccacatacacatgcacttggtaaaatgatgtaaatgatgttgtctccacttattggaggctaactacacaccgcctcggtattaatatggcagaataaggcggtgtatccacacttttgtaccgggcggggaggcctcggccaatcaacgagctggaaatgtcgatggtatcggagaacatctgaagataaaaaaaaaaaagttacaacaccaacccatcaaatcatgtcgcacatcacagaacatccctctcgggcgaagagaagaaagattgacgatcctaaaccggagaaaacggccgtcatatccaatatcaaatctgctgcttcgttgcgtgaattgttggctgtccagcaaaatgccccgttggcaaagcaaggtgaggcaggtcgcaaaccatcctaagctacaacaaaactgactagcaaataggtataatcaagtttaaagagttcttggtgtcaattgcacacacggaaaatgagagcgaaaaggcagagaaattgcgtgtcctcaaggattattgcgataaacagatcaccaactccggaaaggaggatgaaacctcagtgtgctttgcggatataattcaatcttggtcctttggcgatggcaataacaacgagcctttactcactagcgtcccttctgttcttgcgatcttcctcaagacgatctcgtcggaactggagttccgggaatttggaatcgccctgtgcaagcatttgctacagaaagaccagctgagattgttcaaccgcggtctgacagcaaccaagtctaaagagcacttgatctcaccgtgcctgcgtttgcttacggagatcgtgacttttgacggaggagcagtggcacgacagctgtatcttcggcgctacattacctttaagcgactggaggtcttcctggcccctaacaaagcacaggagatctcaggagatgagtcccacaagtcgacgctcagacgcaacgctcaacgatacctgctcgcaaacctgagagtccagcatgcctccgagaagggtgatatcatcgaacagcacaagattaccaggtctttccttgaatatatccggaaggatccgcgggatactgtattagaaattatcaaggctatcgaaagggacgtggtacaagattccgctctgtcccgcaaatcgaagagcaagtttttcaacagacataatctcgaacgactggtgacgctttatggctatgatcgagagtcagatgaacctaatgctggaggtgtcgttatcgccaatgagatccaccgagtcatgatgaatgtgtgcaaaaccgccgggctcggtgtcctcttgcccgagaccggctggtatcccgtcggaaccgatccagagaccttacccgttgatgatgatacatgcattgaattaggccttgattctcccatatacgtggacaaataccgagagtctatccccgtgcgaaatggttccctttcattcctcattcagtgccttcggcctgatgtggatagtctccagattgaactgctggtttccatcttcagggttgcaccagagcttgttgccgattatttctcaagaaaaactatgtttatttcagacccaaaggccaccccttcgtggatggccgagtcggccttccttttttcaaccgtgcagttgcctgtccctgcaaactgtggctggaaggataaacagcctatcctgccaccgccggtctctgtcgttattgaaaatattctccctcgtccccttggccagaagatcatgacccgctgcctcaaccagaatgcggagatcatcaccttgttcgccgtgcgtatcctgactctcgcattcactaagctgcgggctgtcctcaaaatcttccaggcggatcacggccaaggccaactattctggaatcaggcttctgctaagctgctggcagagttctcccgccgatgccctgctgtcaaggatgtcgttgtcctcttccgaagaacagaaagggaggacctgacccagcaggaggctgttgcagagcttttgacctgttactatgaagtgatgccggacattgctctagaggaaaactttgacgtctccctagttttggtggatgttctcaagcgcctggaagccccagacattagcgcggatgattctgaatcgcttttgagccaacttcagagtatcctccagatcgcacaacaatcagcttcattgcgttggtggcaaaagccagcatccatgcaatactcacccttcacctcgattctcaaggttctcatggatacttcagataaagattcttcgcggcgtatctctactctgttcaagactgttctggttgataactctgttctgcaaagctccccacacgcatttgcatctgtcttatcaagccttgagaattccgaggctgatgctttgcatcagcagctggtcttttttgataactgtgtctcccgtgttgccaagaagccagttcactaccaggacttgctacagtcattatccgaggatgtgtctagaactactagcgcgcttgttgctgccattgttgagcaatggccatttgtcgtcaaaggcggagatgcatctacggaagctgccgttggtgcctggatcgcaagtcttctcggtaatctgaagcaggcgggtgagagtaccaaggtacttaaagctgctcgggatgcgttggttgaagcaactgagaccaaaaagatcaagtctcttctcaagaagtccgtgaaagaggcagatgatgccgacaacgaagacaagatggacattgactctggctctaacgtgcctagttcatccaacaaggcctctgccgttgacctcgatgagatctttggatccctgcccactgaaggcacgacccacaatgccctgaacaaatgggaaagagaggacattgcagaagcagtagaccagggtcatgtcgccgagttgatgctctgcatttgttctcagcacgaagaagtccggagacaggccttcgccaacattattcgcttcatggccaaactcaaggattctacctatgcagaatggcgcacagtgtttactctagctggcgagctcctcgagacagtcaacaacattggcatggagaagcccgttccctggattgtgggcgagtgcgcttcaaactgcctggaggttctcatagaccccctccacaaggtctacggaaaagtcaacaagttcctgcagaaggcaccattatgggaagtcgagaagatcccaacatactgggtcgataaaatcctcttgcacgaacctgagttggatgatgggtatttcgacgagatcgactggctcctaaatctatttatcaaggcactccgcaccgaggctgtaagtttctacctttcagttctatactccaaaagcacgattgctaacacattgaatctaggatatggaggtttaccgacgagctaatgtcttcgaacgcattctttccctctaccagtccccaaccctcggcccagcagctcgacgaaagatcctgcacattgtataccgcgctgcccaggtgggtggcagtactaccctgatcactcgttctggtgtcatcagttggatccagatccaagccgcagaggctgatacgaaggaggctgctcagcttgcagcacttgcacgtgctttgtatgagacgtgtgaccgggagcgggttgatggctggagtaatggaactcttgggcgggtcgttgatgagatccaggcgcaagtttgaggtgttggaatttgtacaatagcagatcgtttggatgattggcgttcttgcctttctgaacatatgtagtacggcagtctaccgccagtccgatagtaaaatttgacctggctcaccggattcttattgcctacatcctccttcacactatattatatggcaaaaacaaaaccaaaaacatacagcagtatgtttaaggtggtggtggtcacggttcgggcatccgacaaagagagaattcttggcgcaggccgttaacgtgcactcatggtgtccaaatcaaattaaataggatcacacgtcaagtctggttgtgctgtatctaccattccctcttcaagcccataaaatccttatcctcggtcacagcatcgcccgctttctcaaacaccctgagaatctgagagttcctctccttaacgttacttaacataatgtcaattgccttcgcggcctgctctccaagaaccatctcatctgcttttgatgcttcatcggcaatctcatgtaaccgcttaagccagtataaccatctccagggactaaatcctccaggtgcccgttgacctagctccgactggacaaaggtgaagccacctgccccaaaggtagtatcggagcaatcattccatgagacatcggataagagtatgatgttatgcccggcttctcagatccaggcacatgcagatgggagtaacgacgcaatagaacgtccaggcattgttcggcgatattcttcgtgttcatcatccggctcattagagctcccaagaggacgctcgcactcgaatgtgtcccgaaaaaggatcagagcaatctggcaaagccgatcgttcgcaatgcgcgtggacgcaagcttcgcaaggaaggacgcagcattaaggcgctgctttgcgttcatttccgcgcagtcgttgatccagcactctgtcatgtccgtcgcaaggaacggcatgtcgttccagactgtcccatcgagagttctagcaatatcgatgccaccgcccggcgccggtctgattagaggcccgcgtccccgcgtccggaggatgtcgaggacccatctgtcttgctcaaagctttcgtgggagacatgcctggcgcattggtaatagacgcaccagagagaatgcagagacgtctcgcaggaatcaattgacgcccggctctggcaatagctcaggcccgtgatccatactctgttatatgccaccgattggaggaggtcgaaattccctgctcgtgcagcttcctccaactccgcccgatccgctcggctgcatgcagcgaagccgccagagctagctcgcggtactgagctcggtgaatctcttagtaaatcgtgcatcctaagttcaggaatttaaagagctggcagtaccgattggtgatgagtgtcaagagggtgaatctctagaaatgagttaaacgtaggagaggtagagtgcaatgggattagacaatatattatttatataaaaaaaaaaggctgactgtataaagaaaatgagaagtctctgtggcagacagcaacaatcttttgcttccaatcagacccgtatgccatttgtgatataccattatatgccattagtgacacgtcgctgtttagggtaggagacccactggggatcagaaaaagatcagcaggcgtgttcatgacccgatatttggggctagatacgctgactatctcggggaatccagcagagttgaaatgacggagtacaatgatgcgaattatagaaatcgaggtaacagttcacactcaatgctggtatagtgtagaaaacaggacaacatatattgaaatgcagcaaacttgtatatgttcctctacagtagctgctccacgatcaccgagtaccaacacggaaatatccgccttgggaagtcacgacattctgacagatacactttctactaaaagaatcaaaataacatgctttactctcaactgtgtcggtgcactgtgcgtagaagttagtatactcctggagcaatggggtcgagggcaaattacctttttgacctcgcaaccacagatagcgttcagcccactatgagttctataatggcattggttggtttccggatagcactcctagtttgaaaagatcaggcccttcgtctcgtacctcaatgaaccttggagatttactcctcggtactgaatctggcgattgttttcatttctggcatccaagtcatttgatgtaggagatctagggctcgctgggctggctaatgcgcccagagcagcagagagggcaagtccagaagacataaaggtaaaagctttcatgacgacggcgtgcacctttggttacttaagaagcaacaggactgatgttttcgaaaagggatttgtgttctcatctaactctggtatatcgggtctgtagtcatcttatatagactcgattccaacccacagtgggagatcttagataggacaatagtcgaaggtctacggctgggtagcaaactcgcaacaatagtaaggtacatgggaacatttaggccattacactaggccaagcgtccctccaaagaaggaatgtgctgcatcaaccaattgcttaaggctagttatgttgttacctgattgtctacaggcgaagtccgcagtggactacaataaagaaaatacatggtctcagtggatatcccctgttggcatcttactggcggacagccaagcgggtaatacacccgtgcattagtgttgtctcaagattgcggcggctcgctggaccctgggagatcgtcgctcgcgctaagctagaaatttacgcccgtgtatgggtattgtcttaaggggattgcggcatagttagcctcgaccgacgctaagcttatagacaatgacaatagtatctatgataaccgtatggtcattgaatcgagtactagtattaatgttcgaagtcatgtgacctctctccgctcccaacaactatgttagtcccagcagataggtagtttccttttctctcttcacgcaattcataagaactttccagagtatctatatttcatccgtagactccttgatttatctctaataggttataagccctcgttcttgaagctactgtatcactgtaagcttcaatctcttttatcctcctattggtgctagcgttgtaccaccctatactagaattcctttttcgcgaattggaatcctaaccggctgagactaacatcctaaccatagttattatactctataatagtgtacttctattactctaattagttgactgttaaccttgctggccgttcgatactctgatttgtcgactattatattcctgactgttcttaaaaatctaagttaatctactgccttaagtagtagatcgctatcctctagcctaaaattttagggaataccgaattaacgacccctaagggctctctatctcttaaccctatcgttagagggttgcctctctttgaagctttatagctatctcttagagattcgactcttaattgtaaaccatttttttctcttaataattaggctattgatagtaagatactagtttcccttaatatatcttcgatttttaaatataactttaagcgttataataaatccgatattaattagactatttgacggaaaaacggtggtaaggcgagtgtattttgtggcagaaaaatcttaataaattctctaactctctaaaactgacaatagtcctaaaacatgacaatctgatggacaacttagtaatcaaaacaaacaaaacaannnnnnnnnnnnnnnnnnnnnnnnnnnnnnnnnnnnnnnnnnnnnnnnnnnnnnnnnnnnnnnnnnnnnnnnnnnnnnnnnnnnnnnnnnnnnnnnnnnnnnnnnnnnnnnnnnnnnnnnnnnnnnnnnnnnnnnnnnnnnnnnnnnnnnnnnnnnnnnnnnnnnnnnnnnnnnnnnnnnnnnnnnnnnnnnnnnnnnnnnnnnnnnnnnnnnnnnnnnnnnnnnnnnnnnnnnnnnnnnnnnnnnnnnnnnnnnnnnnnnnnnnnnnnnnnnnnnnnnnnnnnnnnnnnnnnnnnnnnnnnnnnnnnnnnnnnnnnnnnnnnnnnnnnnnnnnnnnnnnnnnnnnnnnnnnnnnnnnnnnnnnnnnnnnnnnnnnnnnnnnnnnnnnnnnnnnnnnnnnnnnnnnnnnnnnnnnnnnnnnnnnnnnnnnnnnnnnnnnnnnnnnnnnnnnnnnnnnnnnnnnnnnnnnnnnnnnnnnnnnnnnnnnnnnnnnnnnnnnnnnnnnnnnnnnnnnnnnnnnnnnnnnnnnnnnnnnnnnnnnnnnnnnnnnnnnnnnnnnnnnnnnnnnnnnnnnnnnnnnnnnnnnnnnnnnnnnnnnnnnnnnnnnnnnnnnnnnnnnnnnnnnnnnnnnnnnnnnnnnnnnnnnnnnnnnnnnnnnnnnnnnnnnnnnnnnnnnnnnnnnnnnnnnnnnnnnnnnnnnnnnnnnnnnnnnnnnnnnnnnnnnnnnnnnnnnnnnnnnnnnnnnnnnnnnnnnnnnnnnnnnnnnnnnnnnnnnnnnnnnnnnnnnnnnnnnnnnnnnnnnnnnnnnnnnnnnnnnnnnnnnnnnnnnnnnnnnnnnnnnnnnnnnnnnnnnnnnnnnnnnnnnnnnnnnnnnnnnnnnnnnnnnnnnnnnnnnnnnnnnnnnnnnnnnnnnnnnnnnnnnnnnnnnnnnnnnnnnnnnnnnnnnnnnnnnnnnnnnnnnnnnnnnnnnnnnnnnnnnnnnnnnnnnnnnnnnnnnnnnnnnnnnnnnnnnnnnnnnnnnnnnnnnnnnnnnnnnnnnnnnnnnnnnnnnnnnnnnnnnnnnnnnnnnnnnnnnnnnnnnnnnnnnnnnnnnnnnnnnnnnnnnnnnnnnnnnnnnnnnnnnnnnnnnnnnnnnnnnnnnnnnnnnnnnnnnnnnnnnnnnnnnnnnnnnnnnnnnnnnnnnnnnnnnnnnnnnnnnnnnnnnnnnnnnnnnnnnnnnnnnnnnnnnnnnnnnnnnnnnnnnnnnnnnnnnnnnnnnnnnnnnnnnnnnnnnnnnnnnnnnnnnnnnnnnnnnnnnnnnnnnnnnnnnnnnnnnnnnnnnnnnnnnnnnnnnnnnnnnnnnnnnnnnnnnnnnnnnnnnnnnnnnnnnnnnnnnnnnnnnnnnnnnnnnnnnnnnnnnnnnnnnnnnnnnnnnnnnnnnnnnnnnnnnnnnnnnnnnnnnnnnnnnnnnnnnnnnnnnnnnnnnnnnnnnnnnnnnnnnnnnnnnnnnnnnnnnnnnnnnnnnnnnnnnnnnnnnnnnnnnnnnnnnnnnnnnnnnnnnnnnnnnnnnnnnnnnnnnnnnnnnnnnnnnnnnnnnnnnnnnnnnnnnnnnnnnnnnnnnnnnnnnnnnnnnnnnnnnnnnnnnnnnnnnnnnnnnnnnnnnnnnnnnnnnnnnnnnnnnnnnnnnnnnnnnnnnnnnnnnnnnnnnnnnnnnnnnnnnnnnnnnnnnnnnnnnnnnnnnnnnnnnnnnnnnnnnnnnnnnnnnnnnnnnnnnnnnnnnnnnnnnnnnnnnnnnnnnnnnnnnnnnnnnnnnnnnnnnnnnnnnnnnnnnnnnnnnnnnnnnnnnnnnnnnnnnnnnnnnnnnnnnnnnnnnnnnnnnnnnnnnnnnnnnnnnnnnnnnnnnnnnnnnnnnnnnnnnnnnnnnnnnnnnnnnnnnnnnnnnnnnnnnnnnnnnnnnnnnnnnnnnnnnnnnnnnnnnnnnnnnnnnnnnnnnnnnnnnnnnnnnnnnnnnnnnnnnnnnnnnnnnnnnnnnnnnnnnnnnnnnnnnnnnnnnnnnnnnnnnnnnnnnnnnnnnnnnnnnnnnnnnnnnnnnnnnnnnnnnnnnnnnnnnnnnnnnnnnnnnnnnnnnnnnnnnnnnnnnnnnnnnnnnnnnnnnnnnnnnnnnnnnnnnnnnnnnnnnnnnnnnnnnnnnnnnnnnnnnnnnnnnnnnnnnnnnnnnnnnnnnnnnnnnnnnnnnnnnnnnnnnnnnnnnnnnnnnnnnnnnnnnnnnnnnnnnnnnnnnnnnnnnnnnnnnnnnnnnnnnnnnnnnnnnnnnnnnnnnnnnnnnnnnnnnnnnnnnnnnnnnnnnnnnnnnnnnnnnnnnnnnnnnnnnnnnnnnnnnnnnnnnnnnnnnnnnnnnnnnnnnnnnnnnnnnnnnnnnnnnnnnnnnnnnnnnnnnnnnnnnnnnnnnnnnnnnnnnnnnnnnnnnnnnnnnnnnnnnnnnnnnnnnnnnnnnnnnnnnnnnnnnnnnnnnnnnnnnnnnnnnnnnnnnnnnnnnnnnnnnnnnnnnnnnnnnnnnnnnnnnnnnnnnnnnnnnnnnnnnnnnnnnnnnnnnnnnnnnnnnnnnnnnnnnnnnnnnnnnnnnnnnnnnnnnnnnnnnnnnnnnnnnnnnnnnnnnnnnnnnnnnnnnnnnnnnnnnnnnnnnnnnnnnnnnnnnnnnnnnnnnnnnnnnnnnnnnnnnnnnnnnnnnnnnnnnnnnnnnnnnnnnnnnnnnnnnnnnnnnnnnnnnnnnnnnnnnnnnnnnnnnnnnnnnnnnnnnnnnnnnnnnnnnnnnnnnnnnnnnnnnnnnnnnnnnnnnnnnnnnnnnnnnnnnnnnnnnnnnnnnnnnnnnnnnnnnnnnnnnnnnnnnnnnnnnnnnnnnnnnnnnnnnnnnnnnnnnnnnnnnnnnnnnnnnnnnnnnnnnnnnnnnnnnnnnnnnnnnnnnnnnnnnnnnnnnnnnnnnnnnnnnnnnnnnnnnnnnnnnnnnnnnnnnnnnnnnnnnnnnnnnnnnnnnnnnnnnnnnnnnnnnnnnnnnnnnnnnnnnnnnnnnnnnnnnnnnnnnnnnnnnnnnnnnnnnnnnnnnnnnnnnnnnnnnnnnnnnnnnnnnnnnnnnnnnnnnnnnnnnnnnnnnnnnnnnnnnnnnnnnnnnnnnnnnnnnnnnnnnnnnnnnnnnnnnnnnnnnnnnnnnnnnnnnnnnnnnnnnnnnnnnnnnnnnnnnnnnnnnnnnnnnnnnnnnnnnnnnnnnnnnnnnnnnnnnnnnnnnnnnnnnnnnnnnnnnnnnnnnnnnnnnnnnnnnnnnnnnnnnnnnnnnnnnnnnnnnnnnnnnnnnnnnnnnnnnnnnnnnnnnnnnnnnnnnnnnnnnnnnnnnnnnnnnnnnnnnnnnnnnnnnnnnnnnnnnnnnnnnnnnnnnnnnnnnnnnnnnnnnnnnnnnnnnnnnnnnnnnnnnnnnnnnnnnnnnnnnnnnnnnnnnnnnnnnnnnnnnnnnnnnnnnnnnnnnnnnnnnnnnnnnnnnnnnnnnnnnnnnnnnnnnnnnnnnnnnnnnnnnnnnnnnnnnnnnnnnnnnnnnnnnnnnnnnnnnnnnnnnnnnnnnnnnnnnnnnnnnnnnnnnnnnnnnnnnnnnnnnnnnnnnnnnnnnnnnnnnnnnnnnnnnnnnnnnnnnnnnnnnnnnnnnnnnnnnnnnnnnnnnnnnnnnnnnnnnnnnnnnnnnnnnnnnnnnnnnnnnnnnnnnnnnnnnnnnnnnnnnnnnnnnnnnnnnnnnnnnnnnnnnnnnnnnnnnnnnnnnnnnnnnnnnnnnnnnnnnnnnnnnnnnnnnnnnnnnnnnnnnnnnnnnnnnnnnnnnnnnnnnnnnnnnnnnnnnnnnnnnnnnnnnnnnnnnnnnnnnnnnnnnnnnnnnnnnnnnnnnnnnnnnnnnnnnnnnnnnnnnnnnnnnnnnnnnnnnnnnnnnnnnnnnnnnnnnnnnnnnnnnnnnnnnnnnnnnnnnnnnnnnnnnnnnnnnnnnnnnnnnnnnnnnnnnnnnnnnnnnnnnnnnnnnnnnnnnnnnnnnnnnnnnnnnnnnnnnnnnnnnnnnnnnnnnnnnnnnnnnnnnnnnnnnnnnnnnnnnnnnnnnnnnnnnnnnnnnnnnnnnnnnnnnnnnnnnnnnnnnnnnnnnnnnnnnnnnnnnnnnnnnnnnnnnnnnnnnnnnnnnnnnnnnnnnnnnnnnnnnnnnnnnnnnnnnnnnnnnnnnnnnnnnnnnnnnnnnnnnnnnnnnnnnnnnnnnnnnnnnnnnnnnnnnnnnnnnnnnnnnnnnnnnnnnnnnnnnnnnnnnnnnnnnnnnnnnnnnnnnnnnnnnnnnnnnnnnnnnnnnnnnnnnnnnnnnnnnnnnnnnnnnnnnnnnnnnnnnnnnnnnnnnnnnnnnnnnnnnnnnnnnnnnnnnnnnnnnnnnnnnnnnnnnnnnnnnnnnnnnnnnnnnnnnnnnnnnnnnnnnnnnnnnnnnnnnnnnnnnnnnnnnnnnnnnnnnnnnnnnnnnnnnnnnnnnnnnnnnnnnnnnnnnnnnnnnnnnnnnnnnnnnnnnnnnnnnnnnnnnnnnnnnnnnnnnnnnnnnnnnnnnnnnnnnnnnnnnnnnnnnnnnnnnnnnnnnnnnnnnnnnnnnnnnnnnnnnnnnnnnnnnnnnnnnnnnnnnnnnnnnnnnnnnnnnnnnnnnnnnnnnnnnnnnnnnnnnnnnnnnnnnnnnnnnnnnnnnnnnnnnnnnnnnnnnnnnnnnnnnnnnnnnnnnnnnnnnnnnnnnnnnnnnnnnnnnnnnnnnnnnnnnnnnnnnnnnnnnnnnnnnnnnnnnnnnnnnnnnnnnnnnnnnnnnnnnnnnnnnnnnnnnnnnnnnnnnnnnnnnnnnnnnnnnnnnnnnnnnnnnnnnnnnnnnnnnnnnnnnnnnnnnnnnnnnnnnnnnnnnnnnnnnnnnnnnnnnnnnnnnnnnnnnnnnnnnnnnnnnnnnnnnnnnnnnnnnnnnnnnnnnnnnnnnnnnnnnnnnnnnnnnnnnnnnnnnnnnnnnnnnnnnnnnnnnnnnnnnnnnnnnnnnnnnnnnnnnnnnnnnnnnnnnnnnnnnnnnnnnnnnnnnnnnnnnnnnnnnnnnnnnnnnnnnnnnnnnnnnnnnnnnnnnnnnnnnnnnnnnnnnnnnnnnnnnnnnnnnnnnnnnnnnnnnnnnnnnnnnnnnnnnnnnnnnnnnnnnnnnnnnnnnnnnnnnnnnnnnnnnnnnnnnnnnnnnnnnnnnnnnnnnnnnnnnnnnnnnnnnnnnnnnnnnnnnnnnnnnnnnnnnnnnnnnnnnnnnnnnnnnnnnnnnnnnnnnnnnnnnnnnnnnnnnnnnnnnnnnnnnnnnnnnnnnnnnnnnnnnnnnnnnnnnnnnnnnnnnnnnnnnnnnnnnnnnnnnnnnnnnnnnnnnnnnnnnnnnnnnnnnnnnnnnnnnnnnnnnnnnnnnnnnnnnnnnnnnnnnnnnnnnnnnnnnnnnnnnnnnnnnnnnnnnnnnnnnnnnnnnnnnnnnnnnnnnnnnnnnnnnnnnnnnnnnnnnnnnnnnnnnnnnnnnnnnnnnnnnnnnnnnnnnnnnnnnnnnnnnnnnnnnnnnnnnnnnnnnnnnnnnnnnnnnnnnnnnnnnnnnnnnnnnnnnnnnnnnnnnnnnnnnnnnnnnnnnnnnnnnnnnnnnnnnnnnnnnnnnnnnnnnnnnnnnnnnnnnnnnnnnnnnnnnnnnnnnnnnnnnnnnnnnnnnnnnnnnnnnnnnnnnnnnnnnnnnnnnagtcacgtgatccaactgtatcagggatgaaaaatgacagtattcatcctagattctgacactattcctaaacttaagggagaaagtaactttgctatatagtagtactgtctatatatagccttaaaggaaaataataaggtatatattaaaattatcttagaagataatataaagcctttctatcctaactaccttaactatagtaaaaatgttattcgttagctagctcttattaaagttagcggtaagatagaactaattactccgcttattataaaggaaatggttaaggaacgataaaacgaaaataaaaagctatataatacctattaaaaggaacttaataaataggattagtataatacttaagcctataatcttatttttagtacccttaatctaatcctagcttcttatattaagtagactaatattacgcgagaaattatttagatccttataagagaatatagtatactattatagtagactaactttaaatacttcgaaaccctctgtaatctttagtataagggaaataatccttaggaatttattcgctagtttaaggaagtactctttaagatttactaaaagagatcctctttagatcctataataacccttaatttttttatctatactatttagagtaatcctcgctattaggtatttatttaatccttaaaacctgatcttagtaatcactattttatagtagatatctattataagtttatccttatagaaggatctataaaaattgctagtagaggctacttaagctataatccttctataaatataatatctacttaaaaggatagtttatcctactctaattctaataataagaagaaggataataagaagggatagaataataataaaaagggatctttaaataataataataattctaataataatttttccgataaaaagctaaagaagaagtaatagtataaaaaagaggaggatattattttatatactatttataatactcttagaaatcactacttaagaaactgccctttaaggaataagtaaagagtagtgaatataatttattatacctaaccttagtagtttacttaataattaatctaataagtccctattctataacccggttagattattagctaagtagatacttaaggatagattatccctatttagtaatactagtaatagccttaactaggagtaaatatagtttatactctatatatagccctatctagtttatagtaaggacccccttctagtaacccctttaatagatataataacctatttactaatatactattctaagtaaatactacttatagttcctattctatttctaaggaaggataggctgtaagtaataataataatatttcttactagataattgacttaggtataagtacttatataaccccttattagttagtctttattaattttagataatatatattccttatcttaatagtaattagtaaagtcttttatatagaaggatatagagatattattctctaacttcttaattataatataactaattatctagtctctcttactctttaaaaagtttggcttatactagaacttaagtctagccttatttctatatctactcttaataaagtagatattagtacctaggtaaagaatagtattataatatttaagtactaagatacttatagttctcttaagttaattattagttatatactctataaaggagaatattactagctaaattattatagtattctacaggacggcaagcggggcgccagaaatggctcccattgccccgttttcccgccactcccgaccgcctgcccggctccgccatccccctgccccttccggcatggcgtccactgcgaccgcccaaccaggtttagcgccaccgaggccgcttttattgcccgacgcatccgttcctccctctataaaagaccactcgccctcttgtcaagtctcccacgcactttcactctccttgcccacccgaccccctttcttctcgcccccaccgaccccctttcttctcgcccccaccgacctacaacgcattggactcatcatcctgacgcactgccccttccgtttcaccggagatgccgctgcttccgatcctcagaccgttctggccagcatgggcgacgacgcgacctcaacgcccaggggcatcggctccgaattgatcagtcctcagtggatttttgaccaatattgattacaacagagcgacaggtgctctttgctacacaaattatccagatcgcttcccaccagaactcattgcacatcgagcctgtgctatctatcctcttccgccgacctcgtacgcctccatgaagtctccgaatgacatctttgatgacatattccccgcttccatctgctccttcgaggttacattgcacagctctcgtccctgatatactagcgtatgcttgctcacgactgccaagcgttcttttggcgtcatcaatagctcttttgggacccgatgcacacagccgagaaatcttcgactacacagcttggtatcatgagccaatagcgaaaatccctcagctgcacctgactcctgagctagcgattgcagccagaggcggatgactctattggacggacaatatgtggattcttgtcgtcgggaccgtcccctgtggacatgagattggaacccctgtattctcgcgtcatacatgtgatgtggcttccaggagaagagtgaaaccctctgcgctgcgcgaaagacgggctttgtcgcaaggatgagtgatctccgggtataaagcgaccttcaattccgcccctatggctgattgggaattccaaaccccttcccttcttctgcctgtttcttccctctctgccaataccccaattctcagtcctagtctcattcgatgagccctgccagtcaccatacctgaaaaccctttcaaaccccctgctccgaacatgtcaagcgccgatttccgcgtggaatccttccggccttggaatcccccccaaggaaaagcacagtctctgcggaaccctctcaatatctatcgctatccaagtcctgtctccctcggtgccacgccgcctccctctactgtgatggacgccactttaaagagtcagcaaatgtatgctcccagaactgagcgacatccccttcctgttcgcccaccggtggaggtttgtttgaatggcggtccaccaccggactctcagatcaatcgacacgagccggaggccttagagcgaacatcatctattagtccttgtcctagaactttcgacttcgaggacatcctacatctgcaagatctatcaaactctggagatgatgatcattcaatgactttcggtcattctggccagaccttcgatcctcaaccctccgattttgaatcgggcgacctggagcttgctttcactgctggtcagcactctcaatttggggttactggaggccttagccagactggactgcttctaaaagaagcagcaattgatccggcaattctggacgaccatcatttcccagctatggagcagacccaagcaacagaacctttacctgacgtcgcaacctgcccaggcagatcatcagctgaaaactctcgcctttcggataaagatgcctctttccatggcaggcaacataaaccgaagaggatcgtgaaatctggtcggcagccttacaaaaccaacaatctttcagttgttatagaaagtcgcccaaagtctacaaccggtcgaccttctcaagggctcgggcgtaagaacgtttcgttttctatcgttcgtgctcaattctctgccctttcggtcgacgaccgattacagttcctgtcctggctgttcgagggtgccttagctcattgccttactacgccttcgagcacaaatgatgccgctgcatcacgatccatctcgaaccaggatgaaaacatgacacctaagtctaaacacttgggtaaaggggccgaaaaaatcgatgcggaacatactcgttcctcgagaaagggattacgatggtccgtggaagaggatcatctactagtgaaactcaaggaaaaagaaaatctcgcttggtcggaagtgttcaagcgttttggtcaaaagttccccggaagaagtgaagggtctatacaggtatactggagcacgacgctcaggaaacagcgactaccttgagcggaagactaatagcaaatgccatccatcgctttgctgatgaaggccaggaggcgtgcatctcgtacatgtttacctttaacgcaacctcaatgacccctaatattggtcagtggcgaccatctagtggttgcttgaatcagctgatgcttcgtcatgacgcatagcaaatggagagcgagctggagggtcatagttaataggcgcatgtgtttggcgtgcaaactgatgggacactgcacgtcctctcgggttccgcaacgtaactggtattttacggatgaatagatcttggctgaataaactggtcgaaactccacgtcaaagcaacattgcttggaggtggcggctaggcctgttccaagatctgagggagatctccccaaccaggattcagcttgctccttggagacagaactccacctcccaggtgggcatagttgcttttttcaatgatcacaaaaacgtgtttttcattgctcagttgcccatgtcggccgccagtgcgatactggaacacttttacgctgtatattgccagaattgtaagttatttctctttctaatgacaagacaccgaattcaggcagcgacggccctggtacttgatgactagaaatgtttgcatggaagtggttatgactcgccgggagtcgctccatcccatgttcatacgaaaaaggtcaaacgaatggccgtattcctgcgcaaaggtgcctcatcctcaattgttctttggattaacggggacttaaaagcagactgaacatcatctaagatacatatctcttcccttactgtctaacgccctcccatctaaaagcgcgttcggctcgaacaactcacggtctcggctcgacctgggaaatgcggactatcactggttctgctgcaccatatgttaattcatgccatgccacgtcggtacaggtcgaccaaccgagaggtatattttcgcatctttgctggatgcctctgacttgaaatatctcaccaagaatcattctatctggcttggatctttccaacagcttgacctgctttgcctcttgtcctaatgcattcaacgatgagacttcttgaaatatggtggcaatatgctgcaccctcatatctgtcaaggttagaaagtggcgtcaagaaaacgaaaggtctcctgtttcctactgtgagtcattggtcccatgcccaggtggtccaaatcgcctttcttgttctttctggatcgaacccaaattttcctccatttcagcaaaacttgcgacagtatgcttggttcaagtgcacgaaatgctgtcgcaaaataggcttgtacttgaacagtatctttgatgtcgatgggatgaggttgaatcaaagctgagcgctcatcctctatagacaaaatcgcttcaagatttgtgagcacaattttgagttcgtctaaccgaatgtcgccatcgaataagggcgatatttgaagccggcgaagtatatcattaacaaaacccatgtcaaataaccatggatcgaccgattgatggttactgagattggctattcccgaaaagctgtagtaaatgagtgctatgctggctctactcccaaagggcctcctagaaggggtttgccgcctctatagcatgaacccggaacaagacgattgaagtgaaacttcgccaagcttgaagagcatatatccgaggtaggctttcaaatcctccactgaaaacgcacgaaggcatcccgcttctgtgagaaggtttcgtgctttcatctaccaaccctccacttgcatatgattaaagctcccaggcataaagccagcctcctattgcttttctcccctagtgatgacgcgccgaagcttagcttcatcctcgagggttgaagatgcaatgaaaagatagtttagtattaaaatcatctgtataacactataccgaactttgattatgttttggagagcgaagggcgagcaaatggctgaagatgaaggattcatctttaggtagggaaataatgaaagttgattttgggtctttagatgtgattgaaagcatttggtggcgatgagagctttttgtatagcaaactaaccatagggccactgttggattgcttttatgataaagaacatacaaaaagttgagctctactctacgaagagcctatttctctaggctaggtgtgaaacctcagatgtactgtatgaatattcgcagtgttataactaatcaatccgatatatttgcattttattgctttttactccttcatattactcaccggtattgggatccataaaattagcaaagctagagagtggctagcagaaacttgtgtgcaaaaattaccgaattgtcagctatttcatcttgtgtattgctatacatttttggcgcttcttggacgctttttttcagccatgcaatggtatcctaacctcggtgttatctaaagatatttctgtcgatattgaatcatctcttggcttttaatgtctgtatcttctaggctctctatattcctaaatatgagctccaaggattataccacttgttttcataagtttacctgactggggaattttactcttagctggaaagcggtaactcgagagagcactatgaaaattgaatcagataaaacctttttggcctggagaactttgctgcaaactgtccgaaattccttctgttcggccaatgtgtaaatgcctataagccattaaatatcaaaagtcaactaacgtgagaatgaagtaaaacgagaatgagtcttgtggaggcttggtcatttgacttacatttggcaccatctttaaggatggctttttatcaaatatgtaattggactttcggaaaaccactgttccccggttctatgtcaataattctgcctttgacaagtctaatgttcggaggaatatgagggcgcttaatgatttctctatccgagttgtaatctgattgcatagaggtgtttgggaaattgttttctgagggataagaacatacaaaaagttgagctctactctacgaagagcctatttctctaggctaggtgtgaaacctcagatgtactgtatgaatattcgcagtgttataactaatcaatccgatatatttgcattttattgctttttactccttcatattactcaccggtattgggatccataaaattagcaaagctagagagtggctagcagaaacttgtgtgcaaaaattaccgaattgtcagctatttcatcttgtgtattgctatacatttttggcgcttcttggacgctttttttcagccatgcaatggtatcctaacctcggtgttatctaaagatatttctgtcgatattgaatcatctcttggcttttaatgtctgtatcttctaggctctctatattcctaaatatgagctccaaggattataccacttgttttcataagtttacctgactggggaattttactcttagctggaaagcggtaactcgagagagcactatgaaaattgaatcagataaaacctttttggcctggagaactttgctgcaaactgtccgaaattccttctgttcggccaatgtgtaaatgcctataagccattaaatatcaaaagtcaactaacgtgagaatgaagtaaaacgagaatgagtcttgtggaggcttggtcatttgacttacatttggcaccatctttaaggatggctttttatcaaatatgtaattggactttcggaaaaccactgttccccggttctatgtcaataattctgcctttgacaagtctaatgttcggaggaatatgagggcgcttaatgatttctctatccgagttgtaatctgattgcatagaggtgtttgggaaattgttttctgagggatgaagagtgagaagtcaatatcaagggctctgcgcgttaagagaaaactcactaggacgatttccagatccaccgatgtgtagagctctgctagtctctatttccttttggaggcatactggtagaagcctttcggggctagatgcagatttattatgttccagcctatataccgcgtgttcagttcgcttgtacggggtggcagtatttaggatcgttggctctaggccctggtctgtttcttgctcgtgttttggtctctaaagagactctatccaatttggaagaaacaatcggaaggagatagcagaaaggtaagacatgaggctaaattgatatacagctttgaaacctttcgataagtatggtaaaatcatcaataggaacggaaggctttaagcatgggctggtgttcttttaatatatccaggtggtcatataaagactcctttctactgtcggaggaagctatctatcatacattttaattaaataaaaaggatttagtcatggtgagtatccgtgcctttgacccgtggcgatgatatactcacatcataagcctgccccgattcctgtccaattcttgtatggaccggcaaaagtcgctctagaggcaatgatctttttgagaattgattccccggtactcttgaaatggacaccttccgaaaactccagccaagatgctagaatgctgctagacgcctgcaaggctttgaggaacagcaggtctcgggaaacgtatctggatgagaacatttctcttgaggaaggcttgcgcgccttcgaggggaatgttttgcacagtctcagttatagtactgttctaatgctagtactgatgacctggcatttcgatgcttcgtcttctgaagcgtcgtggggcttgattgctttcttgagacaaccttacgataatgaagtgaggagaatactccaaggtcgatactcaagcattatgcgtgagacggccccttcgaacttcgactttttgcttgtcctgaattgagtctatctggtgatcagagaaattgcatagcatgaatgggtttatatgtatttaatcaacggtatccaagctctttcagacggttaccaatgtcttggagatagccatcataccagtcccttaaggtcccttgcatcgcatatcccaaagcttctgcgagctgctgcctttttttatactcctgtaggcattttgaatgtagacgctggtaataaagagctttcttcgagttaaggtcttcgactggttgttgcaaaatgattggatcattgctgctcaagggaatgaattctggaatcctataattcccccaaacccgtgagatacccgtctccagcaccgcaaggtccactaaataggcaccgttcttgttgcgatggccgtcctgggcttggtgctgagctccgaggtcctgaagaccgatagcatcaaaaactacaccttcgaggccctttcttttgatgtcatccgtaagttggagcccattgtgaggaaaccagattcgcactgtcttggttggttagagctcggtattaacgcgaagaaaagtgaaccttacatgcaagcgaatcggtgccgagcctttggcagagagaccagagcaaggattggcgtcttccgcagattcaagcatacttttttgattgggttctgggcctccaaataaaagtgtctcgcgtgagctgcctggggaggagaagaggcgcggcatgcagcgcgaaagcttacagcgagctttatgtagactcaagcagaccatactaactgccatgaaatcccacagtcgaatgagcctgaaaatccccagtcactttgtagtacaaaaaccaaaaatacttgagctcttttcatcagtccttttacttttcttttatttttgtatcccgctagttacagagctaacatgttaaagtctcgctgcagcttattaccggattgtgcgcgccgcaacgcggtcatgcaacagcctacaagcaccaatccttgggtaagacaaggtgggtaaaagcgccatatcgatagtatctctagtgaccttggcatgatctctctagtgtcatacgccattcatgcatcatgggtcgaattcaaatatctggacttgcactcgccggcttcatacacactggccgctatcagtggctagagagcaaatcggccaaggaagaagggatagattgcatgtgggcttatccattgggcagatgctccccgccggggggggggggggggggggggggggggggggggggggnnnnnnnnnnnnnnnnnnnnnnnnnnnnnnnnnnnnnnnnnnnnnnnnnnnnnnnnnnnnnnnnnnnnnnnnnnnnnnnnnnnnnnnnnnnnnnnnnnnnnnnnnnnnnnnnnnnnnnnnnnnnnnnnnnnnnnnnnnnnnnnnnnnnnnnnnnnnnnnnnnnnnnnnnnnnnnnnnnnnnnnnnnnnnnnnnnnnnnnnnnnnnnnnnnnnnnnnnnnnnnnnnnnnnnnnnnnnnnnnnnnnnnnnnnnnnnnnnnnnnnnnnnnnnnnnnnnnnnnnnnnnnnnnnnnnnnnnnnnnnnnnnnnnnnnnnnnnnnnnnnnnnnnnnnnnnnnnnnnnnnnnnnnnnnnnnnnnnnnnnnnnnnnnnnnnnnnnnnnnnnnnnnnnnnnnnnnnnnnnnnnnnnnnnnnnnnnnnnnnnnnnnnnnnnnnnnnnnnnnnnnnnnnnnnnnnnnnnnnnnnnnnnnnnnnnnnnnnnnnnnnnnnnnnnnnnnnnnnnnnnnnnnnnnnnnnnnnnnnnnnnnnnnnnnnnnnnnnnnnnnnnnnnnnnnnnnnnnnnnnnnnnnnnnnnnnnnnnnnnnnnnnnnnnnnnnnnnnnnnnnnnnnnnnnnnnnnnnnnnnnnnnnnnnnnnnnnnnnnnnccgccaggggcccaatcatccttgttggtggctctggtattaatttctttctcagctctctcctcaaagttgaaccatctcttctaaattatactgtcttaatccatgaaccaacccccttatccatgagatggaatccagcaacgatttccactacgtcgccgatttgaagaggcacatttgtcaccttgaggagatactgagagagtggaaacgttatgtcccacaggatgtcatcttgcgatctcaaataccactcgaaaccacaccatctcatcttcttcaacctcaaatctctcaaactctttcagcgacccagtgtagaaggcatccgttgtcaggtacatctgggtcagaagaaacatggaaaaagcctttacgaactttcatcaacagaattccttctgtagaaaaatggcctggcacagtattacccccttaagtttccgttttgaacttgttattttaaagcgaaactctcttaagagacagtgattcgccgacatcgactatctaatatcgacattcagatatcatccaaaccatcggggcttttgcttccctcgcacaaaaatgtgccaacgatgtgaagtgggcgaaatacattgtatcatatcagaaattactgttaggtgcgctttgtcatattgcatgttgcctcggcgtggacccaaaatcggtggacaaaacgatgaacttgatttcgaaaggaggtcccgaccatctccaagaacttcggcatggagcagcttggggggtcaaggcaattgaccgccttcagacagagagcaattgggatattagaagtggtgacatcttattttactgtcagggttctttgtcgataattttcatatggagctgaccagtgagtctagttaccccgacctttacttctttgaggtactgggcgaaagcaagtcaatcgatttcaatatttaccacctgtttgaaagaagatcaatatacaacacaccaagagagtttgcacacaaaccatctctctgttccgtgcataatcaagtgcatattcggcagaagtgtccagtacgtatatttaacgtttctcgtggcgctatctgctaacaatcagcccctagactctcggacgtgtgcaatgctttacactgcaattttgatcttgctcgaaaatcatttgcaaattggtacttagggtcatttgggtcagatgccatggatgagttggaaaagcagaggatcttctttcccaaggcatacttctccttgaacagggagacggaatttggtgaaagccagactgaaagggactcgcaacccgcgagagactccttgcgcgagtcgcagaaaagacgtcgtattggcagcgggccaaattcaaatcttgacagcttgtctctcactccaactttgtcagccaatgtgcaagtgcaggcagcatttcacgaagaccccaatcgttcccttccaagtccaccaggtgagccatctagaaacgagatcccataacgtgatgctgactcccacagaccactatagatatacctcgagcagaaatgcaagctctctgggggtctcacagcaagaaacacgagatcaacggcttctacttgctaatctggatcaacaatgtgcaatcgacgggcgtcagacggcatattcgcttccccaaatcgcggaagatgaatcacgtaagttcttcattgagtggccaataaaataacgactgaaataacatacagatccatgccatctgaatttgacgggtcctccggattttgcagatgtagaagccctctcatattcccttccctccttcaatgccatatcggagattccatttttaccgctttccgagttttcagctccccaagaaacggtggtgtttccctctccttcacttgactactccataccatccttctcccagatgacaggtatcccctcccctaaataaccacgccatctaatcgaaatgactgtcaaatagtctctttgctccatgtcaccacgcagacacaagagttcaaaatctctatcaatccactccattctattgagtcatcgtttgctagcgggatatttgcatcatgattgacaagagaaacgatcgcattgtcttcgtgtaggaggattgctgttatagtaccatagggttcccgtggagatgctccgttcgtaaagtgtatcaaactggttttcatattctggcccaaggtcagctgcatgcgacatgaatgaaattaatagcgcgaaatccgcacctgcttttgaaagggctgaagaagatctgccggaacgtttcgacataatctcatatgaggcgcatcgtccttcgctgaaaattcggccttcggtagccagttcctcagtttgtcgcaaggatcctgctcctgttttttcgcagccgatcggaggtaagccatgggtccattcactgaatcgtcacttgcgccgctattgagtgcacatatggtgtattgcttgactgggttattttggtcgagataatcggcacgacccttgcgccgtgaggcggggttgggcataacggaatggagcacgtgaaaaattatttagccccaccatggagctcttccagttcgacagttgggaatccaattataatttacaaaatttgctctatggataatcttccctcattcccacgcatgctttcaacaaggcaattgacggggactttcctttgcatattcaagaatctgccataaacacccgtaaatcctgctatactcagcactactaggaaattgacgaaggctgataccgattggcttttgctaggtcgaatatcatctataattaacgtaatttttgccaaggatccgcagtaactattgaaaaggtcgtagagcagtataggctaggaccgaattaacgtggatgtgatttgctttgcgtgtgattcgtgtgatatgccctgccgtatgcagatgacgtgggctgtattgcccttctgattttgacagccgtcgtgtgatataagcgtgtagacgctcggtgatagactgatcagaatatctcggtcgttattcgcgtcagccaattcttgctcagtgagcgcaatttatgcgactacctcggcacatttcctgtttacaatgattgtaatagtttatgcgtgggggctcccgagccctcacgggagggtccgcaattggtccgactccgtaactattaacacctgttaacaattacccctccttttcgttactccagcgttcatctcatgtttttagcaagggccatcagttcgatttttatcttattttaggccgattcacgttcgttcgtgacctcacagaaaatgaaatataatggcgcagatggccttgaattcgaggcaggcaataccaaaatcgacccagctgtattgcacggtaagctacaagccccagcgacctcacaagatctttttcacattgactgccctaccagaactgcccgaaggatgcagggtgtcatccaccgagaaccatggcgtaagcttctgggcgcagacgggtcgtatcgatgtcttgctccgcaatggtacaccgcaatccttcttcatcaaggtcatttcgaaaggactaggcatggatatgaccaggggcgaatttcagtcaatgagcgcgatccataaatttcttccagaatttgtcccaaggcccatcgcttgcggcacctacagcacgataccagacacccacttcttcctctgcgagtttcgagaaatgactgacgatatgccggatccccacaaatttgccgcccttctttcaaagctgcatcagcaaagcgtatcgcctactggcaagttcgggttccatataaccacctacgcaggaaacctaccccagttcgtagcatgggaagagagctgggaggtttttttcgccaagaccatgagacaggcgcttgacctggagattgaaaggaaagggcctagtgaggagctcgatgtcctctccagtgctttgttcgaaatggttatcccaaggctccttaggcccctcgagagtgacggccgaacagtgaagccttcacttgttcatggagacctctggtacgcgaatgcagggattgatgtcgaccaagatcagcctctcgtcttcgatgcatgcagcttctttgcgcacaacgaatgtacgttctcctacgaaaaactcgcggttgctcgcactaaaatttttaattttggagatgaatttggtcagtggcgaccagcttgcaataggtttggagacgagtacgttgctgcctacaatacattcgcccaaatttcgccaccggaagaggatttccaaggccgtttagacctctataggctgtgagacacccagaagctctttccctccttcctggtttgtgtagctgatatcaagctaggaggtttgacacacatgtttcagcgctttttgtcgataacgagacacttcgcacacagtgagtctattccatgcctgcagtctagttttgcggctaatgaacttaacagggtccttgatgtgatgagagatttggtacagagatatggttagtggacaggagcaatattagtatgtactttttctaccgtgtagttctaggaaagtgcgtgctcggaggaagtctcggccacaagcataaaaagccgcaaaagaataactgaaatcgatgagattgaactatctagagctaataaagctgatcaagaagctagagtgaatgtgggaacggggatctcgtcccgtcccacaggattatggctgggcagtttccctatcacattcccgtaagtggtgatctgtatggcatctacgttttggtttgggggttagatatatcccttcacattagtctcttactttatagatactcttttagtcaagtccgccccttatcaccgccaggtcgccaccccgagttaacataatatctctctttgccaaggcacaaacaatgtccttccttccagcaaaccaatcgtatgggacgaaaaagtgctcaaagacctcgatggttgggggatctttgcgttgcgcgatctctagctcgctgatcccaacagagcagatccaaaacgaccggctcaagaatatgagtttcttcgattcgtcaattccgatgacatgtgcaacgcttagttcgaatgcagtcatccatgaacgatgcggagcgaccggactcgatgtcgtgagcaagttttcatcgtcttcatctgtggcgcattgatctaactgcttccctagcaaaaagctgctgtcgttgttttcgatggaaaggcagtctgcgtcaattatcgcaatcatgttgatgctcgcggagctattcggatataacaagtcaagtatgattctttgtttttggccaagtgaatagaagctcgcgcttttgatctctgccgtgtcgttgtccaacgacagtgcaatagatgaaacttcagaccagtcgctccagcagtaagcgctgattttgacattgtcgacacagaccatatgtagggaagattctggatgagagagccatttgcgaattcctggcactagcggatatgtccgctctctctcaaacttaccgctgtccaagttgaacagataatcagaccctcgagtggataccaggaacttcgccgctagttctcctactagcacatctatgattgccttctcggagtcgaggtgggacttgaacagtaccgtcgaatcgctgagccaacctttatctgctgacttacgaattctgtgtgcgaagatcctgttggaggcatcgatgctaaggagggcatctctccgttcaatccagaccaacaggcggactggtgatttatggctgtagagaatccccaagctcgctaccattttccgttcgtacagtacgactgatccatcatcctttccgcaaaagatgacttcgggcgtgtgatgaaccgccatggcagtgatcttcgctttggcttccatggaaaccgtctctaccactgtagtgaaagtggccccactgctgtcatcacttatggaccctcgcaacaaagcttcaggttcccagacagtgcactgggcgcctcgtatgtcggcaagaaacatactgtctctggtaaaggcaagctctttgatataagagttggatgacttgacctagtagagaagcttaaatgtatcaaattcgtaaacgtggataattccatttgcaccacccgctgcgaggagacgcccatccggacttggggcgagggtttggcagttggcacgaaaacattccagctgcttatctgcaaagggatcaagaagggctagatcaccatccaggtatgcgaccgcgagaaggctgatatcaggattggggttgaaagcaagtgcgacgacgacatgcgtgctggtatctccgttggaaagtttcttgccacagctaccagcgtaggcgtcctcttccatgtcccacagcacaattagccggccgctgtaagcgacagcaagcattccttggttggtagaaagagtcagtgcgcatagggccccgcgcggaggcgttcggttcggcgtatcagtttcgtaccatggcctccgcaccgactccggccgggagctacgtcctaaatcccaagttgcgacgtagttgttgctactcgcaatcaaaagcatatctgcatcgaattccatccccatcggacgtagagggctcgcgaggctgtgaaccacttgcccacttctgaagtcccagaccttgaccaacttcataccacaagttgccaagaggtcagtcttggccttaaaagcaacgaacttaattgcttctccgtgctccaaaaccttgtactcttggtaggttatggcgtagtatagtacgacatctcccgagctgagaccaagggcaaggaaatcgtccccatagcacaaggcccttggttggccttgacggaagtcgatacacagcagcctgtcatcccattgcttattaggcgcgccaagcactgcgagcctccggcctaggctcctagtgttgtaaaccatagaatcgatcggacagaatggaggtatcaacgagtatattgctaatagtgatactgcaagggcgttggcgaacatggcaggaatccgagcgagatccgtggtccactgtcgtagcgcttttatccgagggtccagtggtaagcgctcaacggcgcacgcattgacgtacattttgagatgctttaaggcgcggatgaggtgattgagatttcgagactcggcaatcgcctcgatccaagtgaggacgttggaacccaagaactacatgacaagctggaacgtcactgcgaccaatggatcagccctcgagaggtgatatgagtatgctgtatatgcataggcggcaaattctactcttgctgctggcaaatttgccgaaagtcggcgtcggctgttcctccgaggcttcatttcctccccaattaggtaattgagacatacctgagccatacgtgtgtgcgctttagtcctatcgatggagaactcggactcaagtccgccgtctacaagaaattctctggcagtttcatgcaccatcttaaccctcccatatttgtccacgaccaccagttaaccgcagagcgctacgatgctctcctccaatcttaggaatgaatcgtggatatccagagacagagcaccgcccagttcgctgattgtcattggtcgaatcgcgcatgctgcccaaatgagaatggttttggccagctcctttccgcgaacggcctgtgacatatagtctaaagtgcgcttatatagagactccatgcctctcgggacattttcaagaatccgatagatttcctttctgctgtggcagcgcaggagttcctcaagcaccaatactgtccataagaaagaacccttagatttgtcaaggatcttctcggctaaagtatctcgttcgtcaggtccaacgattcctaagtcctaggtcctcctctcaaccaaaagcctgaggtcaaactctgtgtcttttatcgagattggtaaggactggactaggttagatagaatgacagagaaaccttgatccagatcgactgtattccggcttgtgacgaggattctcaagggcatagatttgtccatgttggaaagaatggcatgtaaaagaatatgaggattagagcattcgtccaaggcatcgatgacccagtaataacgagtcgttgtggtctagaatatgccagaaaggaacaaaattctccaaagagtacgttcctcgacgcgatctaagcaaacaccatccgcttgcatccctaggatggcatcacttgcttcggcatcggagctacccatctgaaaagccagggaccggagacaacgacctaggttagacttcgacttatctccatgcttgaagaaaaagtagctgcatgcctggccggactctttgagctagtcgatgacatagccagcgagaacagatttcccggttgcgggcttgcccttgatccatagcgtcctgtcatttccggattccccctctctccatttgacgtaactggctttcgtcgatatccatctgcacgacccgtgcagccgagcttcgcaaacgtttgcaaaatcatcgtctagcatattgaaaatttcaagatagttcttgagacttttgatcctctcgcgtctctgcttcagcttcagctctgcgatcgccgtggcaatcttgctaacagtagaggcgagcgcatttcgtagtagggcataattggagtcttcaggcgtgtcaaacttgcatatcgagcggtggtcagcagccataggtatctgcttctcttcacggtacccgagaacggccgattcgggatcgacgatgagtgagctgaacagtttcatattctgcgtttcgtagaatgaccagagctcaaggccggccgaaaaatgccgaaattcgtcattgatcacttggatcgccccagagttcggttccagatcgccaacataagcgcggtcgtacgcaatcttaaggaggtaccttagcgtctttgccgagtcggcacctcgatgcggcgtggcaaggaaatataatgcggtaaatcgttcagacagtgccttgtgcactttgtcttgtttcgccaggatatatgcttttttcatcaccaagccacccatgctgtggccgatgacaatgatgtatgtcgcagaattcataatgcatggcgaagtgctgatcgcgcttaggaatgtcttgccaatgtggtgtacattcaagcagtcctccctacccttcaaatagtatgagtcgtatccatagctatggatgcgggcgttctggaatgcaggatctttggagagccactcctttggccaaaaatgagattgcagggatgacttgctccatgtctttctagaacttccccctaggccatggacgaagatgacatcaatctccggtaccgtgggagaatacaagaggtttagtccaagcgggcccttcacgtcctccgcctgatcaaccaagatggctgacgtccgggacaggggctttgacagagaaaacaagctcctcgagctcttaattgaatcgcgactactcgaggaattatcggaatgtggatcgggctttgcgcggtgctgctttcgaaagaactggtacagtcagcgatcaagcagaattgaattttccagtaggctaaggagtcgagagtttaccattgtagcccacaaatttcagtgtgtggggcgccaatctcggttgcccgaaatcatctaaaatgacttcagcacgacagtctgtcaatcagaagaacaatggaacaatggaacaatggtacaatgaagtcgtttcaggaaagactgttgatgtccagtgcctcgggatcgaagcaggtagcaattaggcggccaattctccctcccgcttcaaatccttcaaaccaccaatcagctggttgctttaagcgctcctctatgaaccccgcaggctcggtaaaggccagcatgcatctcttctagaaaatcgcgcactccggaattctgtaaaacccccattgacatgcacctttcttgccattccttgatgatgctgtgttgatttggcccataagagagattctccgcgcattgtgttttagtcgaaagagcgatttagcatgggttcccaggcgaatccggccttcacagttggggaccatgaggctttcatggaattcgctctccttcaggctcaaaaatcaccgccggctgccaacaaattctgcgtcggagccatacttgtcgatgccgctaatggcaaggtcctatcgacggggttctcgcttgaatacccacgagactacaagggagacccaggcaccacgcacgcagagcagtgttgttttatcaagattgccgatgagcacaacctcccagaggaacgcatccatgaagtccttccggccaatacggcgttgtacacaacgatggagccatgcaacgagagactgagtggcaacatgacctgcgcgaccaggatcttgagactcaagagcgccataaagaatgtctacgtgggaatcaaagagccaggaacttttatcgcgcacaatgacggacaggagaggctggaggcaaacggcgttagggtcatgttccctgttgaacattggcgtgacaggatcaccagtgtctcaatgatggggcactgaagactgtgatcaggttagctgagataaaagagttgaggttgcggaaacacccggacggcccgtccgcccacacagctctagtttaatctggccctcttattgttacctagggacgaaattggcgtgaatatacatatttgttgctgcgaggctctgggctctttcttccctgcgattacccctccctgtgtagctcattcctcggacataaacgcccccgagtgtgctcatacatgaaaatacagcatgaaaatatgaccgaattagcgttataccctgatctaattgttgtttaagaccaaagtgtattattttcattgtcaagctggaagcgattgggaaagaattcggaagatcccagatatccttgctctaaattaagtgcgttggcgaattgctgcgtgcataggccaaaagacaaaattatcagcgctgttattcttatctaagattcttcaacatgactaactatcctagaagtgatctgtgctcggtaatcgtgtgagctggggcgataagaggcatcccactctgaactgacaaataagtttacctaatccaaagtgataaatatgtgtcaacaaaagaaggttaccacaattttactagtgcgcccgaggaatattcagcacccccctctgcctgatgatcctaaggctcccaacgaccttactaagctcatcccctagttatttattctgcactttctatagtatataaaaatcacactctcaagtactcaattggctatgcccgtactagtccgtactgtaacgaccacgttccggcagtatgcaacctcaagtatcctgcctcgcttgcgccgcgtagcatccccggggtctaccatggattcctcataccgttgctaaattgcaagaatcttctgaactatgtacatggttgatgatggcgcccatccttcttccgcgtgcagctatacaagagatatacatgacccagaaacacccaaaggcttcatctgaatggaaggggctcaacgagagtgatcaaaccaaagaaattcactgctgcactgaattaccaacaatgtccaaataatgtgcacatatattcacagcttgatggaatgaacataagcagcaacctcactgccgaaaatccggtctctcacaagctggtcggccgactcgacgatccaagtctggcagttcctctgagtgagcctgctccaccccctagtggaaccgctccccctcagagaacctgccccgcatcgtggaagtcatgacggtacaccgaattgaggctgctatgctggtactggtacagtaggtcccaaaaacttgtacgaccattaccctcttcgattggttccccaatcctaatgccaagcctcattgatctatatcccgaatagggacggaaaattgatattccggtatctgcgtcatcacctgctctacacaagtcggatagcacattcaactctcctgcctgcctcgcagtggtcgggagcaaacagccgggacattctcatttgtcagatacttttaccgtggtcactcgactttacaacttctttgctatcgctttgaattctggactttattgacggcgaccaccgttaaatgcatcccgcaaatgatatcacaacgacggtcgatgacggctctcattcacgggagagcattcctccatggggctcattgcccattgaacaatatctgattgtaggatacacgagacacagcctgtttattcgcgacttgtcattcgctaacaactcaacagagaaactggaatcattctgcgaccgacacacccaaccagcagcggcggcaactaattcaccagttcctcaatttcgatgagattcccgaagaatatgtttctttgaatgggttccccccgctaaagccaacgtcggaggagattgatattattcttcaaccctggcgatccgatagcgaccttcgtcggaaagcatactatatgtccaaagataacgtgcttgtttttcttcggacccactataacccagacgacaatgacagaatgaacgaatggggctgtggaaacgatctgttcgaggataacgcctggtgggcgtgtctcaatgatccgtatttattcaatttcggctcagattggcagcaggtgtacgaaatcatgcctgagttcgctggtcccgttgatcgcaggagacaatctgctgatccaaccaatttagaaggctcttcagcaacgtccgaaagaagtctgcacacaaagaagccgggaggtttccatgagtggacagagcatcaggtaaagaagactgaggagtcagccaatcctctacagaacgtcaccatagcggcatacattgttattgcggatcaggagtcttttcagactggactgttgcagttattttgtttggacgataatcgaaaaattgtctgggaggctcgggttgatcgaaagccagctgagatcatgagacgtattcgccactcgggtcctgcactagaactataattttctgaatacaaaaaaaacaggattgtgaagcacatggccacaagtagatatggtgcagtagagacctaatagataaataatcttgaggtctcgccatatcaagagagatagactaccaacgcaatctgtcagtacacatccataggtagcaatcatcactatgccagcgtcgcgtaacaatgatcgtgtaagctaaaatcaggtacattctgtgctcttgacagcttgtcatgcggcttctttagcctcggctgcaatgggaggatgaccagggcctttgaatagcacaccgatgatggaaatgtcatcagaaaccctatcgctgatctcatgaattttgcttgggtcaagagatgatatctgggaaagggtataggtctgcatggcgtgagtatatgcacttatggcactctgggccagagggttgccagggctagggtcgaaaatcgattcgggcatgacgggctagaacgattgtttcgttgcgtaatttcgttcactggggcacgtcttaagttgtcgtaacacaatcttgcttgggaatcagcccgatcaactgaccagcgatctagcgtgtataggcaagagaaaaaggcgtacaaaaatatgctgcggcgaaatcgttgtagaaggaagtagaacgcaactgccattgatgaaaatataaattgttggatgacaattcaccgaaggaagaggatgtcgtgctaacaggaaaagcagaggaaccagatggggtgcgaacccagattcacggtgaatcagacacccattacgcacgcaagtggctttgcttgcggacccgagggaaccaattgggaggatgtcgacggacagggagaacgggaagtggggtagtaatgtctttagtcgcgatgcggccggagaaagtagccgtccactggactcggtggattgcaccgcagctcatgtcagggcaaaggataaatttggatcatgcttcttggtttattccccccaatagttaacatcctgtgcatactcttcattggcttaccgaccggtctgcgaccacgcgtcagggatgcaacaaagatccccagccactattttcggtattttcaaataggatccacaaaagtgcacaatcacaattctacgtcttatcccacatgagatgctttgtttatgggccaagatttgcgagtctcttggagaaagtaccccactgaatgttcgacttctatgctcgggttgtgttactggatgatttgttccaacagctgcctctttgctgctattgcagtgctttaggggagacgtttctcattatgctgtctgtacagatagcgtcccgaggtacaagggtttcgttatactgagtttacatcaaaaagcgcaaggttttctattttgatttataatactcctgatctgatccagccttaccatctaactgcatttcgtatgggtggctctgatcgcatggaggagggttctctatggcccttgtgcacattgacggctggtgggtcgactgggattgtgcttgtggcttagacttgttcatgttgctgctatggtttgagagaggcccgtgtagaaggtacgatggctgggcatgagggctgttcatttggctaccatcattatagcccattcgccgcttgcttttaggatagtactgttgctgggaagcatgtcggagcctttgggaagcagattggagattttccctctgcttctgcttctgctcctcgtgttcagtggcggccctaatggaggatatatgagtatgagagtgacaagcatgggtggaagacttaaagaacggacttggatgtagctttaatgaggctatagccaccacctaaagcaaggccagtcttgatgacacccacattttcaaaggggaaggagtttcggtagaagcttaggggattattgaaaatgtggaaatttgaagaccggaaaccgagggctattcattattgtctagcactagaagctgtgtcgttcgagaaccagagttaggcccctacacggttcggatttattggcaggctttctgggaagatgagaggggtaggtaaatggggcgcggggtgcgaagcagtggtctagcgtgcattccaggtgccattgtgactaaacatgcgttcccctgatgaaacgccaacagatggaataacaggaaatcaggagaagcgaggactatcatatattcatagtaaaatgtcataacttaactgtaccgtgctcaagagcgggatggaatctgtccaagtgggtgccctccctggaagcggtgagggtgcagcaaaggttcgaagatcacggataccgtctgtcttcctcgtttgccggtccgacgttcttgaaaccccagagaccttacgagtctaatacagaagctattttgaagctgtcatttacgcttgtactggaatactgccaagaaaggggttcaggggtagaataaccgtaacgggtatagcgtatttcgccacaactgcctctttgtggctgctgcaatgcattaggggagctatttctcaatatgctgtctgttcagtgtccggggtataagggtttcattgtatatactgcattttacaccaaaaggcgcttggttctattacgggggccacttaggtatattttgacatcataggctaagctgaaatgtagcgcttgccattatttatctaagacactatcacgatattaccaactgcatcacacctgtctacgtccaatcaataccagggccgcatcaagtgcaaggcaaggctcaacgacgtgcggatgtaaaaatatccaataggaaagaaatacatccattaataaattaacaggaacagtgagagcttcaaagttggcgaggacgttcagaaccgcttgaccggactaagaggaattccgatgccatgcttgccacggcatttgtgctccaaggcttccagcaagcggtatatttcttgttccagctgacggccttggcctcgcggatccatagttgcacttctttcttagttagctgctcggtgaattcaccgccggtcaacagcctgtccactgattgttcgaatttgctgcaacaagcgagaatattctggcagttccaaagaacatacaaaataaaagcgtccaaaggaaaagttttgttttgtctgcagaataattagcggaagatgagcagtcagggaacttggagaagctccacattttctttcccgtttcctcactacacaaaagaaaaaaaccacgtcccagatggcaaccggaccaccaccagcgctcaccaactagcttgtgctcgtgaaaagacttccgagtcctctccgctattgctttagaaagggacgctgtgccacagatgatgtctgtggctttgaccttcgcagtctggccagggtgaccggcttctttttgtctgtgaagctcttcgacatacgccaaataaagcataatatccgcgagccgagatttgagataatgtgtctcttcgcccgcttgcatagcatctacgtatctccaaatcgcaaagcctttcgtgctggaggatacgaggggatacttcgccacgtcaagctgtggagaatgccaaaatccggtcaacttccatgatttggtgtgcttttccataaaataaggcatgtcaggtcgcaagatacgatcgcactttctttcaacttcgtccttcttttctggcgatagagtggataggagaggatcgcataagaagcggccattccatttatctttacctggcttggaaggtaccgttgtcttagtagggccaacacttgaatccacacgacctttgaccactgaacgtgctaagattctccccgacgaggaattttcgccgacattctctgcaatttcgtcgtaatgcggggcttgaatcccactctttcccttttcgagacgaggtctgaggtttctggagttgggagctgaatgtgattcaagtccgggaaaaagcttccgtttggtttgcaaaatttggcggttttcacattccgaagtcacttgacgactatcagtgtgttgctcctcattgggcagattatgccggtcacttctattgaaggtaggggagatagacaccggagtgaaggttattggatttgactcggtattcacggaattgttgtcaccaggtggagaattttcgatactgcaagaggtgtcctgcaaaaatctgggcatctcgtccaagacggactcaatttccgagtctccaaagtcttcgtcattggtggatgcagtctgggggtgatcattttcggtatcatcagaggcatcttcgaccgttggctgcaatttcgagaaggtgggtgtactctgatgtttgtcgacagctcgattctctgagtcaatgccgcttgttgtccttcctgccgatctctccacatatttactccttgaaactggcgtatctggagggtttgaagtgggcgtgggaaaagacagacctgcgcctgacctcagagatggtgaagatgttcccagggctgggcgattttcacccgaatggttgcctgtaacattttgttgtgcttcttcaacagccgatatctccatctcattaaaacccccttcttgcatgatgccagctgaaacattatgcggtgaagtttctggtgacctctcacctatccatacaaggcggccgctgacaggagttggagacgttgggaggctagccacgggactatcttcatcgatatccatgcccggggtccattggtcttcggaccctcccgtcaaacgtgatatgaatgatgcgctttctttcgtaggatcgcaggacctaggagtggagctgggtgaaggttcgggtgcgtttgaattgtcacattctcggagtgcccagtcaaattcattagagggacaaccatcgtgtggggtaacgggagacggtttggcatgtgggttgtgggctatttctgttttcgaagttagcctttgttcaaatgtctaaagcccaatctctgtagaattttggatattaccgtgtgggggtgaggctggttgactcaacatagcttccgcgttcgaaagtgtcggggttccaaaacggctaggatcaggcgttgaaacaaaggctgtcatgttgtggtctcgtacgttcatgtccatcgtagttaacgaagggtctagaaagagagcacagtaaacaacggcaattctcgtgcgtcagaaacatgaaagccttaccgatgcagactggctcaggcgatcgagcatgcgcgacattaccaaaggccgaagtacatgttgcaggcgactgcacttggcaataatccacgatatcatagtcgatgagacaatctgtgctcattcgggctcgctcgtagaggacggcgatctcatcgcgagaaagcgaagattggattttgcaacagtggcagagggagcgtaaaatctgcattgagattagatatcttgcgaccggtgggatatggaaatgacaaacctcatctgctgacagggacggtaggttatttagactgttctgttctgcatcaccagtattctgtaggcaacgtcagatatttagaaaacaacgtaaggaagaaacccacattcaaagtaaacctgatttggagcatttccgacgcaagtgccctctggtggggaaataaaggaaagttgtagtgatatggctgggccactggaagggtgcgtaggaaagggtatcgtagagagttggtcgggcgaagaagacctgatggagggaaatcgccctgctcactctctgctcaccctctgctcaccctctactcaccctccctgatcatgaggggtgttgaatttcgcaaacttcggcatctcgatgaacataacctgaaaagagggttggaatacgcgacaaacactgtgtcactcttaaaccgaatttaaaccgcaaattgtttggtcgtgttaggggcaacaagtgaggtagagagtggaaattcaacaacgtggttaacatggtaggcattatcagctggtctgatttagtcaatgctcagtgaatatcatgtgaacggaggatggaccaatgaagggccctaaaaaggcttacgtagactgagcactccgggcgtgggtggaaaatcctttttcctttgtactcacaatagggggcggaggatatggaaggctctggtaccacgtgaccgtgtcgaattttcgatacgatcacgtgaagtttctcccgttataggccggcacaatcctgagggggatgttgaccttgccgaattatttcatgctgttgtttgattgtttccatcaaaatggtggaacaggacagcagagccctatattcgcattcgattttctaatctctcctatagaagttgtaggtatctccctacaacgataacaagaatgtagatgtattaaatcattttacatccgcccgcaattcttcctcttccaccctttcccagccaggaataatgtcttctaaggtctctctgattggccgtggataataatggtgctgtaattcaataagccaagtaacttccagcgcgacaaaatcactcatacatacctcgtccttttctgccgggagccacttcttcttacttgactcgaagatgtatagttggccactttgccgatttcggacggctacaacaacgtctgactcacagtagatactgtactcggctgcctttttgaaaaggccttttctgcgcctgcgtaacttctgtgctctcgcacgaaggttctcatgtttggcggtgattttagaaattagttcggaacttggagccattggcatatatgagaatatttcggattcttttcagcagcttatccgcattcgtggttaatatatctttgctcacggtctcagtgagggtccgccggatcctacaaggaagcagcatttgctgtgctgcgcggcccatccacagcgaccaagtatcgagcccttcaatggtgtattttgagtatacttattctcagcgagccattttaaggtcggttcgtaactgatacgtccgccataagaaggatataacagctcgggtttcgcttttattttgattcgcaacatggatatcttgactatctatgcgatcgccgttggcggcatcttcacaagtcttattatcattagagtcttgaatgtctttgcgccctggggcaacgcgatgaatgttttcatttaccagcatcttgcatatccgtatgttcttcgccgccattcacgtctggggccttggacacgagccggtgtttctcttcatttgatctacctcgcagtcaatttgctgctcctgtttttcaaccatatatccatggcagccactggtcgtcgagcaggaacgctgtcgctgctcaatatgatattccttctggcttcatggcatctgagcaacttggctgatattttcgggatttctctgagaatttaccgacggatgcatcgtgctgcaggttggatggtggtagctttggtattgtttcacgtttttgccatgctacagggcaaaattcaagaggatcaggggatgaacactgggcgcctttctgcaataattgtttgtaaaatgaatcagtcattacctggatctgatctaacaacatattgatatttagggcgctgggtctctatgctcgcttgtcattttatccctgcctttctgtcgaaagttttcatacgagttgtttcttcgactccatcaggcactcgttgttgcaagtgtttatgggatttggcggcatcttcccggtgaaacgtattccccccggttctatctctatgttgcattgggaatattgggctgtacgtccctctcccacttgatactccttctttataggaatggtctcttttctggcaacggatgcccgagagctattgcgatctgccatacgaatgaacgcgacgcagaaaatgcaggccaacacgtgaggacaacgccaattcgagtccgcctcattctgccaaggccagtcaaagcaatggccgggcaatacatcaacctgtggctgccttcgctgagtttatggtcctgggcacagacgcacccatttatgatcacgtcatggtctcgggcagaccagggtgtgttggatctcttggtagagccccgtggagggctcaccaaagctcttgtccgccaggcgcacgcagcagcaaaggacaacttctcttctttggccctttatagcggcccccacgggatcagcgagtctgtggataaatacgagagcgtcctgttggtagcaagtggggcaggtattgccgctatcattccttatgcaaagaaattgatccacggttataacacgtgcacatcgcatgtccgcagggtgcacttgatatggcaggtagaatcgcttggttggtttttttgctcttgatgaacaaaaggggataggctgactagatagatgttgctatatccatgcaaggcctcctgaacggtttgttaaaagacgatgtgctagatgatggctacgttcgtttgaaggtgttgtttcatgaccattagctgacgaagccttagatacttgccatatctgtctacgttgggcgagggcctctcacacatggaaaactgccctttggcaagcacgaacgagcttttctataccagggcgctccggactattcaatcatcattcctacggaggtttccggtgaaaaaatcgaaagactccccaatatccgagacgagagaggccaaatgctattgatcggtaggattctacgagcacgatagattgccaaacgctgacatggtaatgtttatagcttccacctcgggacatttgcgagatactctgcgacatattgtccaaggatatttacaccaacgcctgcaaatgatagaactcgagtatcagctataactctgaggctctggttgataatattgcggggcaggtgggcctatcatctgagggctcagggtgttgtgtagttccttgcgtgcgttggaattagaacgtcaatagcagatgtggttttgcgagattaggcttaggtgatggggatctacaatagacatgcaatttggacgaatcagggtgtggaggctgcgacactatttggggaagcggcactgtttaggtgccgcacccgcactctgtagtttaggccacgatttgtcgctgagaccacgatttttggcccaggccacgattcggtgtcgcggccacattttggtgctcagttctgctcagtccgatgatgtcatttctttgggcaattcatcttgcccttctatatctcagcgtttctgaacgattctgctcagggaacgtgactgatcattttccacactatttcagccttcttgattcccgttctccgctcgttgtctcgcccattcttggaatcccaaagctctctccctaagtgcttctgcaccgtccattctttattcttattgacgacattatttatttggccctggtttttttccttcatacgaacccgactttcatttttattgttaccgaatactgcctacgctagaccagaggtacgaatttctgagattgtatgctgaaattcaccagacctgaactctcaagtatttagaagtgcaagtcaaggtaaacaagccttttcttctttttcaagaacacctatcacattgccagtgtgagctaataatgaaattgcaagatggccgaatctaccggtctcatggacgatacgattgactggatcaatcataaaacccacacgccaaatcctgtatcagatcagctttccggaccacaatgcgatcatcttgatttcacatccaacctgaacattccgcccattccgcaaggctttgacagctaccccactactgggaatgtcatcaactatgctttcattaccaacagcaagatcagaaacacggtcatgaataaagttgtctgcattagcgttacgatgagagatcctcgaattacaaatactatgatcctcaattgtgtggatacaaaccgcattcccactttcacaacgcttgataacgctgatattgacgccgcttttgtatttaactctatcatcgtcacctctaatatcgacaattgcgacgttgctgaatcaacccttggcaatgctaggctcattaatcccgtcttctgcccgtttctgtttccagagctaccgctttcagtccaggacaattcgaccaacgccggggtccagattgattataatataacacctgatacgacttttaacacacccggcattacatctcaaaaccaagaaataccgaatacttcagctcaaggcatgcaaggggctctccgaaatgacacagacgtggctcctcaattatcattgaacctgctccaagaggctcgggcttccttccagaattccataccggagattggcagccacggggaacacaacagtgaagatcaagtggaaacctcgaccgaaaatgtctcgatcctaccaaatgtatcatcacctatcgggatttatgcgacccccatttctgattgcagcacaccctatgacaaagttgctgcgccatcttataagccaaaaaaacgaacacgaaaacaattagtttcgaaaggaaagagaaagagacgaacagaaccaaagccgcgtgtggggaatacaaataacaacattcttgctcttctcaaaaattgcgtttgtgggagcaaaagcaaagaactcaacaacaaacaagcacgggaggttcagacagttgcggattacatgattgtgaatgattgccacgcattattacagcctcaacttaagaaatggcagaagaatttgtccagtgataagcacgccctcggattcccgcctttggaaaagagtgcgacagctgcggcgaaatacttcgaactactccagtctgagagacttcttaagtatagcctggaacaccgcatggcgctcatttctttttacttgatttatcttgaaatcgcccgtgaaatgagggataatgaagacctcggtgactacgagcctcgatctggagacgacagatttacaacaatggccaacgacaagatcctagcgaccatccacgggattaaagtacagaccatcagcaaggaagaaattgatcgtggtagagcaaggctgaacgagtttcatcgctggggcaaacgatggtggacgcttgcgagtggtgtcggtcttggagtactacttgtacccggtgaacagctcgctatggcaatgtgagtgattccgaaacaaaactagcttttcttccaatactgactccgcctgatattgcagcagaaacgagaaatttgccatgagccaaataaacgcgttgataacgtatatcaaagctgctcgcccaggatgcctttttttcttcaaatcattggagaatatcgcaaaggcaataatgtttgggcaactgcctggtgacctgatccaggctttga
